(19) United States
(12) Patent Application Publication
(10) Pub. No.: US 2008/0301838 A1
(43) Pub. Date: Dec. 4, 2008

(54) Nucleic acid molecules and other molecules associated with plants

(76) Inventors: Robert E. Buehler, Chesterfield, MO (US); Joseph R. Byrum, West Des Moines, IA (US); Brian E. Coombs, Imperial, MO (US); Gregory R. Heck, Crystal Lake Park, MO (US); Thomas J. La Rosa, Fenton, MO (US)

Correspondence Address: ARNOLD & PORTER LLP, 555 TWELFTH STREET, N.W., ATTN: IP DOCKETING, WASHINGTON, DC, 20004, US

(21) Appl. No.: 11/978,192

(22) Filed: Oct. 29, 2007

Related U.S. Application Data
(63) Continuation of application No. 09/663,423, filed on Sep. 15, 2000, now abandoned.
(60) Provisional application No. 60/154,375, filed on Sep. 17, 1999.

(51) Int. Cl. C12N 15/82; C12N 15/11; A01H 5/00

(52) U.S. Cl. 800/287; 536/23.6; 800/298; 800/314; 800/320.1; 800/312; 800/320.3

(57) ABSTRACT

Expressed Sequence Tags (ESTs) isolated from soybean are disclosed. The ESTs provide a unique molecular tool for the targeting and isolation of novel genes for plant protection and improvement. The disclosed ESTs have utility in the development of new strategies for understanding critical plant developmental and metabolic pathways. The disclosed ESTs have particular utility in isolating genes and promoters, identifying and mapping the genes involved in developmental and metabolic pathways, and determining gene function. Sequence homology analyses using the ESTs provided in the present invention, will result in more efficient gene screening for desirable agronomic traits. An expanding database of these select pieces of the plant genomics puzzle will quickly expand the knowledge necessary for subsequent functional validation, a key limitation in current plant biotechnology efforts.

### INCORPORATION OF SEQUENCE LISTING

[0001] A copy of the Sequence Listing in compute readable form containing the file named Seqlist Corrected 6-24-05.txt, which is 1,066,046 bytes in size (measured in Windows XP) and created on Jun. 24, 2005, is herein incorporated by reference.

### FIELD OF THE INVENTION

[0002] The present invention is in the field of plant biochemistry. More specifically the invention relates to nucleic acid molecules that encode proteins and fragments of proteins produced in plant cells, in particular, soybean plants. The invention also relates to proteins and fragments of proteins so encoded and antibodies capable of binding the proteins. The invention also relates to methods of using the nucleic acid molecules, proteins and fragments of proteins.

### BACKGROUND OF THE INVENTION

### 1. Expressed Sequence Tag Nucleic Acid Molecules

[0003] Expressed sequence tags, or ESTs, are short sequences of randomly selected clones from a cDNA (or complementary DNA) library which are representative of the cDNA inserts of these randomly selected clones. McCombie, et al., Nature Genetics, 1:124-130 (1992); Kurata, et al, Nature Genetics, 8: 365-372 (1994); Okubo, et al, Nature Genetics, 2: 173-179 (1992), all of which references are incorporated herein in their entirety.

[0004] Using conventional methodologies, cDNA libraries can be constructed from the mRNA (messenger RNA) of a given tissue or organism using poly dT primers and reverse transcriptase (Efstratiadis, et al., Cell 7:279-288 (1976); Higuchi, et al., Proc. Natl. Acad. Sci. (U.S.A.) 73:3146-3150 (1976); Maniatis, et al, Cell 8:163 (1976); Land, et al., Nucleic Acids Res. 9:2251-2266 (1981); Okayama, et al., Mol. Cell. Biol. 2:161-170 (1982); Gubler, et al., Gene 25:263 (1983); all of which are herein incorporated by reference in their entirety).

[0005] Several methods may be employed to obtain full-length cDNA constructs. For example, terminal transferase can be used to add homopolymeric tails of dC residues to the free 3′ hydroxyl groups (Land, et al., Nucleic Acids Res. 9:2251-2266 (1981), herein incorporated by reference in its entirety). This tail can then be hybridized by a poly dG oligo which can act as a primer for the synthesis of full length second strand cDNA. Okayama and Berg, report a method for obtaining full length cDNA constructs. This method has been simplified by using synthetic primer-adapters that have both homopolymeric tails for priming the synthesis of the first and second strands and restriction sites for cloning into plasmids (Coleclough, et al., Gene 34:305-314 (1985), herein incorporated by reference in its entirety) and bacteriophage vectors (Krawinkel, et al., Nucleic Acids Res. 14:1913 (1986); and Han, et al., Nucleic Acids Res. 15:6304 (1987); both of which are herein incorporated by reference in their entirety).

[0006] These strategies have been coupled with additional strategies for isolating rare mRNA populations. For example, a typical mammalian cell contains between 10,000 and 30,000 different mRNA sequences. Davidson, Gene Activity in Early Development, 2nd ed., Academic Press, New York (1976). The number of clones required to achieve a given probability that a low-abundance mRNA will be present in a cDNA library is N=(ln(1−P))/(ln(1−1/n)) where N is the number of clones required, P is the probability desired, and 1/n is the fractional proportion of the total mRNA that is represented by a single rare mRNA. (Sambrook, et al., Molecular Cloning: A Laboratory Manual, 2nd ed., Cold Spring Harbor Laboratory Press (1989), herein incorporated by reference in its entirety).

[0007] A method to enrich preparations of mRNA for sequences of interest is to fractionate by size. One such method is to fractionate by electrophoresis through an agarose gel (Pennica, et al., Nature 301:214-221 (1983), herein incorporated by reference in its entirety). Another such method employs sucrose gradient centrifugation in the presence of an agent, such as methylmercuric hydroxide, that denatures secondary structure in RNA (Schweinfest, et al., Proc. Natl. Acad. Sci. (U.S.A.) 79:4997-5000 (1982), herein incorporated by reference in its entirety).

[0008] A frequently adopted method is to construct equalized or normalized cDNA libraries (Ko, Nucleic Acids Res. 18:5705-5711 (1990); Patanjali, S. R. et al., Proc. Natl. Acad. Sci. (U.S.A) 88:1943-1947 (1991); both of which are herein incorporated by reference in their entirety). Typically, the cDNA population is normalized by subtractive hybridization (Schmid, et al., J. Neurochem. 48:307-312 (1987); Fargnoli, et al., Anal. Biochem. 187:364-373 (1990); Travis, et al., Proc. Natl. Acad. Sci. (U.S.A.) 85:1696-1700 (1988); Kato, Eur. J. Neurosci. 2:704 (1990); and Schweinfest, et al., Genet. Anal. Tech. Appl. 7:64 (1990); all of which are herein incorporated by reference in their entirety).

[0009] Subtraction represents another method for reducing the population of certain sequences in the cDNA library (Swaroop, et al., Nucleic Acids Res. 19:1954 (1991), herein incorporated by reference in its entirety).

[0010] ESTs can be sequenced by a number of methods. Two basic methods may be used for DNA sequencing, the chain termination method of Sanger et al., Proc. Natl. Acad. Sci. (U.S.A.) 74: 5463-5467 (1977), the entirety of which is herein incorporated by reference and the chemical degradation method of Maxam and Gilbert, Proc. Nat. Acad. Sci. (U.S.A.) 74: 560-564(1977), the entirety of which is herein incorporated by reference. Automation and advances in technology such as the replacement of radioisotopes with fluorescence-based sequencing have reduced the effort required to sequence DNA (Craxton, Methods, 2: 20-26 (1991); Ju et al., Proc. Natl. Acad. Sci. (U.S.A.) 92: 4347-4351 (1995); Tabor and Richardson, Proc. Natl. Acad. Sci. (U.S.A.) 92: 6339-6343 (1995); all of which are herein incorporated by reference in their entirety). Automated sequencers are available from, for example, Pharmacia Biotech, Inc., Piscataway, N.J. (Pharmacia ALF), LI-COR, Inc., Lincoln, Nebr. (LI-COR 4,000) and Millipore, Bedford, Mass. (Millipore BaseStation).

[0011] In addition, advances in capillary gel electrophoresis have also reduced the effort required to sequence DNA and such advances provide a rapid high resolution approach for sequencing DNA samples (Swerdlow and Gesteland, Nucleic Acids Res. 18:1415-1419 (1990); Smith, Nature 349:812-813 (1991); Luckey et al., Methods Enzymol. 218:154-172 (1993); Lu et al., J. Chromatog. A. 680:497-501 (1994); Carson et al., Anal. Chem. 65:3219-3226 (1993); Huang et al., Anal. Chem. 64:2149-2154 (1992); Kheterpal et al., Electrophoresis 17:1852-1859 (1996); Quesada and Zhang, Electrophoresis 17:1841-1851 (1996); Baba, Yakugaku Zasshi 117:265-281 (1997), all of which are herein incorporated by reference in their entirety).

[0012] ESTs longer than 150 bases have been found to be useful for similarity searches and mapping. (Adams, et al., Science 252:1651-1656 (1991), herein incorporated by reference.) EST sequences normally range from 150-450 bases. This is the length of sequence information that is routinely and reliably generated using single run sequence data. Typically, only single run sequence data is obtained from the cDNA library, Adams, et al., Science 252:1651-1656 (1991). Automated single run sequencing typically results in an approximately 2-3% error or base ambiguity rate. (Boguski, et al., Nature Genetics, 4:332-333 (1993), herein incorporated by reference in its entirety).

[0013] EST databases have been constructed or partially constructed from, for example, C. elegans (McCombrie, et al., Nature Genetics 1:124-131 (1992)), human liver cell line HepG2 (Okubo, et al., Nature Genetics 2:173-179 (1992)), human brain RNA (Adams, et al., Science 252:1651-1656 (1991); Adams, et al., Nature 355:632-635 (1992)), Arabidopsis, (Newman, et al., Plant Physiol. 106:1241-1255 (1994)); and rice (Kurata, et al., Nature Genetics 8:365-372 (1994).

### II. Sequence Comparisons

[0014] A characteristic feature of a protein or DNA sequence is that it can be compared with other known protein or DNA sequences. Sequence comparisons can be undertaken by determining the similarity of the test or query sequence with sequences in publicly available or propriety databases (“similarity analysis”) or by searching for certain motifs (“intrinsic sequence analysis”) (e.g. cis elements) (Coulson, Trends in Biotechnology, 12: 76-80 (1994); Birren, et al., Genome Analysis, 1: 543-559 (1997); both of which are herein incorporated by reference in their entirety).

[0015] Similarity analysis includes database search and alignment. Examples of public databases include the DNA Database of Japan (DDBJ)(http://www.ddbj.nig.ac jp/); Genebank (http://www.ncbi.nlm.nih.gov/web/Genbank/Index.htlm); and the European Molecular Biology Laboratory Nucleic Acid Sequence Database (EMBL) (http://www.ebi.ac.uk/ebi docs/embl db.html). A number of different search algorithms have been developed, one example of which are the suite of programs referred to as BLAST programs. There are five implementations of BLAST, three designed for nucleotide sequences queries (BLASTN, BLASTX, and TBLASTX) and two designed for protein sequence queries (BLASTP and TBLASTN) (Coulson, Trends in Biotechnology, 12: 76-80 (1994); Birren, et al., Genome Analysis, 1: 543-559 (1997)).

[0016] BLASTN takes a nucleotide sequence (the query sequence) and its reverse complement and searches them against a nucleotide sequence database. BLASTN was designed for speed, not maximum sensitivity, and may not find distantly related coding sequences. BLASTX takes a nucleotide sequence, translates it in three forward reading frames and three reverse complement reading frames, and then compares the six translations against a protein sequence database. BLASTX is useful for sensitive analysis of preliminary (single-pass) sequence data and is tolerant of sequencing errors (Gish and States, Nature Genetics, 3: 266-272 (1993), herein incorporated by reference). BLASTN and BLASTX may be used in concert for analyzing EST data (Coulson, Trends in Biotechnology, 12: 76-80 (1994); Birren, et al., Genome Analysis, 1: 543-559 (1997)).

[0017] Given a coding nucleotide sequence and the protein it encodes, it is often preferable to use the protein as the query sequence to search a database because of the greatly increased sensitivity to detect more subtle relationships. This is due to the larger alphabet of proteins (20 amino acids) compared with the alphabet of nucleic acid sequences (4 bases), where it is far easier to obtain a match by chance. In addition, with nucleotide alignments, only a match (positive score) or a mismatch (negative score) is obtained, but with proteins, the presence of conservative amino acid substitutions can be taken into account. Here, a mismatch may yield a positive score if the non-identical residue has physical/chemical properties similar to the one it replaced. Various scoring matrices are used to supply the substitution scores of all possible amino acid pairs. A general purpose scoring system is the BLOSUM62 matrix (Henikoff and Henikoff, Proteins, 17: 49-61 (1993), herein incorporated by reference in its entirety), which is currently the default choice for BLAST programs. BLOSUM62 is tailored for alignments of moderately diverged sequences and thus may not yield the best results under all conditions. Altschul, J Mol. Biol. 36: 290-300 (1993), herein incorporated by reference in its entirety, uses a combination of three matrices to cover all contingencies. This may improve sensitivity, but at the expense of slower searches. In practice, a single BLOSUM62 matrix is often used but others (PAM40 and PAM250) may be attempted when additional analysis is necessary. Low PAM matrices are directed at detecting very strong but localized sequence similarities, whereas high PAM matrices are directed at detecting long but weak alignments between very distantly related sequences.

[0018] Homologues in other organisms are available that can be used for comparative sequence analysis. Multiple alignments are performed to study similarities and differences in a group of related sequences. CLUSTAL W is a multiple sequence alignment package available that performs progressive multiple sequence alignments based on the method of Feng and Doolittle, J. Mol. Evol. 25: 351-360 (1987), the entirety of which is herein incorporated by reference. Each pair of sequences is aligned and the distance between each pair is calculated; from this distance matrix, a guide tree is calculated, and all of the sequences are progressively aligned based on this tree. A feature of the program is its sensitivity to the effect of gaps on the alignment; gap penalties are varied to encourage the insertion of gaps in probable loop regions instead of in the middle of structured regions. Users can specify gap penalties, choose between a number of scoring matrices, or supply their own scoring matrix for both the pairwise alignments and the multiple alignments. CLUSTAL W for UNIX and VMS systems is available at: ftp.ebi.ac.uk. Another program is MACAW (Schuler et al., Proteins, Struct. Func. Genet, 9:180-190 (1991), the entirety of which is herein incorporated by reference, for which both Macintosh and Microsoft Windows versions are available. MACAW uses a graphical interface, provides a choice of several alignment algorithms, and is available by anonymous ftp at: ncbi.nlm.nih.gov (directory/pub/macaw).

[0019] Sequence motifs are derived from multiple alignments and can be used to examine individual sequences or an entire database for subtle patterns. With motifs, it is sometimes possible to detect distant relationships that may not be demonstrable based on comparisons of primary sequences alone. Currently, the largest collection of sequence motifs in the world is PROSITE (Bairoch and Bucher, Nucleic Acid Research, 22: 3583-3589 (1994), the entirety of which is herein incorporated by reference.) PROSITE may be accessed via either the ExPASy server on the World Wide Web or anonymous ftp site. Many commercial sequence analysis packages also provide search programs that use PROSITE data.

[0020] A resource for searching protein motifs is the BLOCKS E-mail server developed by S. Henikoff, Trends Biochem Sci., 18:267-268 (1993); Henikoff and Henikoff, Nucleic Acid Research, 19:6565-6572 (1991); Henikoff and Henikoff, Proteins, 17: 49-61 (1993); all of which are herein incorporated by reference in their entirety). BLOCKS searches a protein or nucleotide sequence against a database of protein motifs or “blocks.” Blocks are defined as short, ungapped multiple alignments that represent highly conserved protein patterns. The blocks themselves are derived from entries in PROSITE as well as other sources. Either a protein or nucleotide query can be submitted to the BLOCKS server; if a nucleotide sequence is submitted, the sequence is translated in all six reading frames and motifs are sought in these conceptual translations. Once the search is completed, the server will return a ranked list of significant matches, along with an alignment of the query sequence to the matched BLOCKS entries.

[0021] Conserved protein domains can be represented by two-dimensional matrices, which measure either the frequency or probability of the occurrences of each amino acid residue and deletions or insertions in each position of the domain. This type of model, when used to search against protein databases, is sensitive and usually yields more accurate results than simple motif searches. Two popular implementations of this approach are profile searches (such as GCG program ProfileSearch) and Hidden Markov Models (HMMs) (Krough et al., J. Mol. Biol. 235:1501-1531 (1994); Eddy, Current Opinion in Structural Biology 6:361-365 (1996), both of which are herein incorporated by reference in their entirety). In both cases, a large number of common protein domains have been converted into profiles, as present in the PROSITE library, or HHM models, as in the Pfam protein domain library (Sonnhammer et al., Proteins 28:405-420 (1997), the entirety of which is herein incorporated by reference). Pfam contains more than 500 HMM models for enzymes, transcription factors, signal transduction molecules, and structural proteins. Protein databases can be queried with these profiles or HMM models, which will identify proteins containing the domain of interest. For example, HMMSW or HMMFS, two programs in a public domain package called HMMER (Sonnhammer et al., Proteins 28:405-420 (1997)) can be used.

[0022] PROSITE and BLOCKS represent collected families of protein motifs. Thus, searching these databases entails submitting a single sequence to determine whether or not that sequence is similar to the members of an established family. Programs working in the opposite direction compare a collection of sequences with individual entries in the protein databases. An example of such a program is the Motif Search Tool, or MoST (Tatusov et al. Proc. Natl. Acad. Sci. 91: 12091-12095 (1994), the entirety of which is herein incorporated by reference.) On the basis of an aligned set of input sequences, a weight matrix is calculated by using one of four methods (selected by the user); a weight matrix is simply a representation, position by position in an alignment, of how likely a particular amino acid will appear. The calculated weight matrix is then used to search the databases. To increase sensitivity, newly found sequences are added to the original data set, the weight matrix is recalculated, and the search is performed again. This procedure continues until no new sequences are found.

### SUMMARY OF THE INVENTION

[0023] The present invention provides a substantially purified nucleic acid molecule that encodes a soybean protein or fragment thereof comprising a nucleic acid sequence selected from the group consisting of SEQ ID NO: 1 through SEQ ID NO: 1717.

[0024] The present invention also provides one or more substantially purified nucleic acid molecules comprising a nucleic acid sequence selected from the group consisting of SEQ ID NO: 1 through SEQ ID NO:1717 or complements thereof.

[0025] The present invention also provides a substantially purified soybean protein or fragment thereof, wherein said soybean protein is encoded by a nucleic acid molecule that comprises a nucleic acid sequence selected from the group consisting of SEQ ID NO: 1 through SEQ ID NO: 1717.

[0026] The present invention further provides a substantially purified protein, peptide, or fragment thereof encoded by a nucleic acid sequence which specifically hybridizes to a nucleic acid molecule comprising a nucleic acid sequence selected from the group consisting of a complement of SEQ ID NO: 1 through SEQ ID NO: 1717.

[0027] The present invention further provides a substantially purified antibody capable of specifically binding to a protein or fragment thereof encoded by a nucleic acid sequence which specifically hybridizes to a nucleic acid molecule having a nucleic acid sequence selected from the group consisting of a complement of SEQ ID NO: 1 through SEQ ID NO:1717.

[0028] The present invention also provides a transformed plant transformed to contain a nucleic acid molecule which comprises: (A) an exogeneous promoter region which functions in plant cells to cause the production of an mRNA molecule; which is linked to (B) a structural nucleic acid molecule, wherein said structural nucleic acid molecule comprises a nucleic acid molecule that encodes a protein, peptide, or fragment thereof which hybridizes to a nucleic acid sequence selected from the group consisting of a complement of SEQ ID NO: 1 through SEQ ID NO: 1717 expressed in an effective amount to produce a desirable agronomic effect; which is linked to (C) a 3′ non-translated sequence that functions in plant cells to cause the termination of transcription and the addition of polyadenylated ribonucleotides to the 3′ end of the mRNA sequence.

[0029] The present invention also provides a transformed plant cell containing a nucleic acid molecule whose non-transcribed strand encodes a protein or fragment thereof, wherein the transcribed strand of said nucleic acid is complementary to a nucleic acid molecule that encodes a protein or fragment thereof. The present invention also provides bacterial, viral, microbial, and plant cells comprising a nucleic acid molecule of the present invention

[0030] The present invention also provides a method of producing a plant containing one or more proteins encoded by sequences comprising SEQ ID NO: 1 or complement thereof through SEQ ID NO:1717 or complements thereof, expressed in a sufficient amount and/or fashion to produce a desirable agronomic effect.

[0031] In accomplishing the foregoing, there is provided, in accordance with one aspect of the present invention, methods of producing genetically transformed plants, comprising the steps of:
[0032] (a) inserting into the genome of a plant cell a recombinant, double-stranded DNA molecule comprising
   [0033] (i) a promoter which functions in plant cells to cause the production of an RNA sequence,
   [0034] (ii) a structural DNA sequence that causes the production of an RNA sequence which encodes a desired protein.
   [0035] (iii) a 3′ non-translated DNA sequence which functions in plant cells to cause the addition of polyadenylated nucleotides to the 3′ end of RNA sequence; where the promoter is homologous or heterologous with respect to the coding sequence and adapted to cause sufficient expression of a protein in desired plant tissues to enhance the agronomic utility of a plant transformed with said gene.
[0036] (b) obtaining a transformed plant cell with said nucleic acid molecule that encodes one or more proteins, wherein said nucleic acid molecule is transcribed and results in expression of said protein(s); and
[0037] (c) regenerating from the transformed plant cell a genetically transformed plant

[0038] The present invention also encompasses differentiated plants, seeds, and progeny comprising said transformed plant cells and which exhibit novel properties of agronomic significance.

[0039] The present invention also provides a method of producing a plant containing reduced levels of a protein comprising: (A) transforming a plant cell with a nucleic acid molecule that encodes a protein, wherein said nucleic acid molecule is transcribed and results in co-suppression of endogenous protein synthesis activity, and (B) regenerating plants and producing subsequent progeny from the transformed plant.

[0040] The present invention also provides a method of determining an association between a polymorphism and a plant trait comprising: (A) hybridizing a nucleic acid molecule specific for a polymorphism to genetic material of a plant, wherein said nucleic acid molecule comprising a nucleic acid sequence selected from the group consisting of SEQ ID NO: 1 through SEQ ID NO:1717 or complements thereof; and (B) calculating the degree of association between the polymorphism and the plant trait.

[0041] The present invention also provides a method of isolating a genetic region, or nucleic acid that encodes a protein or fragment thereof comprising: (A) incubating under conditions permitting nucleic acid hybridization: a marker nucleic acid molecule, preferably an EST, with a complementary nucleic acid molecule obtained from a plant cell or plant tissue; (B) permitting hybridization between said marker nucleic acid molecule, preferably an EST, and said complementary nucleic acid molecule obtained from said plant cell or plant tissue; and (C) isolating said complementary nucleic acid molecule.

[0042] The present invention also provides a method for determining a level or pattern in a plant cell of a protein in a plant comprising: (A) incubating, under conditions permitting nucleic acid hybridization, a marker nucleic acid molecule, the marker nucleic acid molecule selected from the group of marker nucleic acid molecules which specifically hybridize to a nucleic acid molecule having the nucleic acid sequence selected from the group consisting of SEQ ID NO: 1 through SEQ ID NO: 1717 or complements thereof or fragments of either, with a complementary nucleic acid molecule obtained from the plant cell or plant tissue, wherein nucleic acid hybridization between the marker nucleic acid molecule and the complementary nucleic acid molecule obtained from the plant cell or plant tissue permits the detection of an mRNA for the enzyme; (B)

[0043] permitting hybridization between the marker nucleic acid molecule and the complementary nucleic acid molecule obtained from the plant cell or plant tissue; and (C) detecting the level or pattern of the complementary nucleic acid, wherein the detection of the complementary nucleic acid is predictive of the level or pattern of the protein.

[0044] The present invention also provides a method for determining the level or pattern of a protein in a plant cell or plant tissue comprising: (A) incubating under conditions permitting nucleic acid hybridization: a marker nucleic acid molecule, the marker nucleic acid molecule comprising a nucleotide sequence selected from the group consisting of SEQ ID NO: 1 through SEQ ID NO:1717 or complements thereof, with a complementary nucleic acid molecule obtained from a plant cell or plant tissue, wherein nucleic acid hybridization between the marker nucleic acid molecule, and the complementary nucleic acid molecule obtained from the plant cell or plant tissue permits the detection of said protein; (B) permitting hybridization between the marker nucleic acid molecule and the complementary nucleic acid molecule obtained from the plant cell or plant tissue; and (C) detecting the level or pattern of the complementary nucleic acid, wherein the detection of said complementary nucleic acid is predictive of the level or pattern of the protein synthesis.

[0045] The present invention also provides a method for determining a level or pattern of a protein in a plant cell or plant tissue which comprises assaying the concentration of a molecule, whose concentration is dependent upon the expression of a gene, the gene having a nucleic acid sequence which specifically hybridizes to a protein marker nucleic acid molecule, the molecule being present in a plant cell or plant tissue, in comparison to the concentration of that molecule present in a plant cell or plant tissue with a known level or pattern of said protein, wherein an assayed concentration of the molecule is compared to the assayed concentration of the molecule in a plant cell or plant tissue with a known level or pattern of said protein.

[0046] The present invention also provides a method of determining a mutation in a plant whose presence is predictive of a mutation affecting a level or pattern of a protein comprising the steps: (A) incubating, under conditions permitting nucleic acid hybridization, a marker nucleic acid, the marker nucleic acid selected from the group of marker nucleic acid molecules which specifically hybridize to a nucleic acid molecule consisting of the nucleic acid sequence selected from the group consisting of SEQ ID NO: 1 through SEQ ID NO: 1717 or complements thereof or fragments of either and a complementary nucleic acid molecule obtained from the plant, wherein nucleic acid hybridization between the marker nucleic acid molecule and the complementary nucleic acid molecule obtained from the plant permits the detection of a polymorphism whose presence is predictive of a mutation affecting the level or pattern of the protein in the plant; (B) permitting hybridization between the marker nucleic acid molecule and the complementary nucleic acid molecule obtained from the plant; and (C) detecting the presence of the polymorphism, wherein the detection of the polymorphism is predictive of the mutation.

[0047] The present invention also provides a method for determining a mutation in a plant whose presence is predictive of a mutation affecting the level or pattern of protein synthesis comprising the steps: (A) incubating under conditions permitting nucleic acid hybridization: a marker nucleic acid molecule, the marker nucleic acid molecule comprising a nucleic acid molecule that is linked to gene, the gene having a nucleic acid sequence which specifically hybridizes to a sequence selected from the group consisting of SEQ ID NO: 1 through SEQ ID NO:1717 and complements thereof, and a complementary nucleic acid molecule obtained from a plant tissue or plant cell of the plant, wherein nucleic acid hybridization between the marker nucleic acid molecule and the complementary nucleic acid molecule obtained from the plant permits the detection of a polymorphism whose presence is predictive of a mutation affecting said level or pattern of a protein synthesis in the plant; (B) permitting hybridization between said marker nucleic acid molecule and said complementary nucleic acid molecule obtained from said plant; and; (C) detecting the presence of the polymorphism, wherein the detection of the polymorphism is predictive of the mutation.

[0048] The present invention also provides a method for reducing expression of a protein in a plant cell, the method comprising: growing a transformed plant cell containing a nucleic acid molecule whose non-transcribed strand encodes a protein or fragment thereof, wherein the transcribed strand of said nucleic acid is complementary to a nucleic acid molecule that encodes the protein in said plant cell, and whereby the strand that is complementary to the nucleic acid molecule that encodes the protein reduces or depresses expression of the protein.

[0049] The present invention provides soybean nucleic acid molecules for use as molecular tags to isolate genetic regions (i.e. promoters and flanking sequences), isolate genes, map genes, and determine gene function. The present invention further provides soybean nucleic acid molecules for use in determining if genes are members of a particular gene family.

[0050] The present invention also provides a method of obtaining full length genes using soybean ESTs or complements thereof or fragments of either.

[0051] The present invention also provides a method of isolating promoters and flanking sequences using soybean ESTs or complements thereof or fragments of either.

[0052] The present invention also provides soybean ESTs or complements thereof or fragments of either for use in marker-assisted breeding programs.

[0053] The present invention also provides a method of identifying tissues comprising hybridizing nucleic acids from the tissue with soybean ESTs or complements thereof or fragments of either.

[0054] The present invention also provides a method for production of antibodies targeted against the proteins, peptides, or fragments produced by the disclosed or complements thereof or fragments of either.

[0055] The present invention also provides a method for the transformation and regeneration of plants comprising sequences hybridizable to the disclosed ESTs or complements thereof or fragments of either.

[0056] The present invention also provides a method of modifying plant protein expression by inserting in a chimeric gene sense or antisense constructs of the soybean ESTs.

### DETAILED DESCRIPTION OF THE INVENTION

### Agents

[0057] (a) Nucleic Acid Molecules

[0058] Agents of the present invention include nucleic acid molecules and more specifically EST nucleic acid molecules or nucleic acid fragment molecules thereof. Fragment EST nucleic acid molecules may encode significant portion(s) of, or indeed most of, the EST nucleic acid molecule. Alternatively, the fragments may comprise smaller oligonucleotides (having from about 15 to about 250 nucleotide residues, and more preferably, about 15 to about 30 nucleotide residues).

[0059] A subset of the nucleic acid molecules of the present invention includes nucleic acid molecules that are marker molecules. Another subset of the nucleic acid molecules of the present invention include nucleic acid molecules that encode a protein or fragment thereof. Another subset of the nucleic acid molecules of the present invention are EST molecules.

[0060] The term “substantially purified”, as used herein, refers to a molecule separated from substantially all other molecules normally associated with it in its native state. More preferably a substantially purified molecule is the predominant species present in a preparation. A substantially purified molecule may be greater than 60% free, preferably 75% free, more preferably 90% free, and most preferably 95% free from the other molecules (exclusive of solvent) present in the natural mixture. The term “substantially purified” is not intended to encompass molecules present in their native state.

[0061] The agents of the present invention will preferably be “biologically active” with respect to either a structural attribute, such as the capacity of a nucleic acid to hybridize to another nucleic acid molecule, or the ability of a protein to be bound by antibody (or to compete with another molecule for such binding). Alternatively, such an attribute may be catalytic, and thus involve the capacity of the agent to mediate a chemical reaction or response.

[0062] The agents of the present invention may also be recombinant. As used herein, the term recombinant means any agent (e.g. DNA, peptide etc.), that is, or results, however indirect, from human manipulation of a nucleic acid molecule.

[0063] It is understood that the agents of the present invention may be labeled with reagents that facilitate detection of the agent (e.g. fluorescent labels (Prober, et al., Science 238:336-340 (1987); Albarella et al., EP 144914, chemical labels (Sheldon et al, U.S. Pat. No. 4,582,789; Albarella et al, U.S. Pat. No. 4,563,417, modified bases (Miyoshi et al, EP 119448, all of which are hereby incorporated by reference in their entirety).

[0064] It is further understood, that the present invention provides bacterial, viral, microbial, and plant cells comprising the agents of the present invention.

[0065] Nucleic acid molecules or fragment thereof of the present invention are capable of specifically hybridizing to other nucleic acid molecules under certain circumstances. As used herein, two nucleic acid molecules are said to be capable of specifically hybridizing to one another if the two molecules are capable of forming an anti-parallel, double-stranded nucleic acid structure. A nucleic acid molecule is said to be the “complement” of another nucleic acid molecule if they exhibit complete complementarity. As used herein, molecules are said to exhibit “complete complementarity” when every nucleotide of one of the molecules is complementary to a nucleotide of the other. Two molecules are said to be “minimally complementary” if they can hybridize to one another with sufficient stability to permit them to remain annealed to one another under at least conventional “low-stringency” conditions. Similarly, the molecules are said to be “complementary” if they can hybridize to one another with sufficient stability to permit them to remain annealed to one another under conventional “high-stringency” conditions. Conventional stringency conditions are described by Sambrook, et al, In: Molecular Cloning, A Laboratory Manual, 2nd Edition, Cold Spring Harbor Press, Cold Spring Harbor, N.Y. (1989), and by Haymes, et al. In: Nucleic Acid Hybridization, A Practical Approach, IRL Press, Washington, D.C. (1985), the entirety of which is herein incorporated by reference. Departures from complete complementarity are therefore permissible, as long as such departures do not completely preclude the capacity of the molecules to form a double-stranded structure. Thus, in order for an nucleic acid molecule or fragment of the present invention to serve as a primer or probe it need only be sufficiently complementary in sequence to be able to form a stable double-stranded structure under the particular solvent and salt concentrations employed.

[0066] Appropriate stringency conditions which promote DNA hybridization are, for example, 6.0× sodium chloride/sodium citrate (SSC) at about 45° C., followed by a wash of 2.0×SSC at 50° C., are known to those skilled in the art or can be found in Current Protocols in Molecular Biology, John Wiley & Sons, N.Y. (1989), 6.3.1-6.3.6. For example, the salt concentration in the wash step can be selected from a low stringency of about 2.0×SSC at 50° C. to a high stringency of about 0.2×SSC at 50° C. In addition, the temperature in the wash step can be increased from low stringency conditions at room temperature, about 22° C., to high stringency conditions at about 65° C. Both temperature and salt may be varied, or either the temperature or the salt concentration may be held constant while the other variable is changed.

[0067] In a preferred embodiment, a nucleic acid of the present invention will specifically hybridize to one or more of the nucleic acid molecules set forth in SEQ ID NO: 1 through SEQ ID NO: 1717 or complements thereof under moderately stringent conditions, for example, at about 2.0×SSC and about 65° C.

[0068] In a particularly preferred embodiment, a nucleic acid of the present invention will include those nucleic acid molecules that specifically hybridize to one or more of the nucleic acid molecules set forth in SEQ ID NO:1 through SEQ ID NO: 1717 or complements thereof under high stringency conditions.

[0069] In one aspect of the present invention, the nucleic acid molecules of the present invention have one or more of the nucleic acid sequences set forth in SEQ ID NO: 1 through SEQ ID NO: 1717 or complements thereof. In another aspect of the present invention, one or more of the nucleic acid molecules of the present invention share between 100% and 90% sequence identity with one or more of the nucleic acid sequences set forth in SEQ ID NO: 1 through SEQ ID NO:1717 or complements thereof. In a further aspect of the present invention, one or more of the nucleic acid molecules of the present invention share between 100% and 95% sequence identity with one or more of the nucleic acid sequences set forth in SEQ ID NO: 1 through SEQ ID NO:1717 or complements thereof. In a more preferred aspect of the present invention, one or more of the nucleic acid molecules of the present invention share between 100% and 98% sequence identity with one or more of the nucleic acid sequences set forth in SEQ ID NO: 1 through SEQ ID NO:1717 or complements thereof. In an even more preferred aspect of the present invention, one or more of the nucleic acid molecules of the present invention share between 100% and 99% sequence identity with one or more of the sequences set forth in SEQ ID NO: 1 through SEQ ID NO:1717 or complements thereof. In a further, even more preferred aspect of the present invention, one or more of the nucleic acid molecules of the present invention exhibit 100% sequence identity with one or more nucleic acid molecules present within the cDNA libraries designated LIB3, LIB4, LIB5, LIB6, LIB7, AND LIB8 (Monsanto Company, St. Louis, Mo., United States of America).

[0070] In a preferred embodiment of the present invention, a soybean protein or fragment thereof of the present invention is a homologue of another plant protein. In another preferred embodiment of the present invention, a soybean protein or fragment thereof of the present invention is a homologue of a fungal protein. In another preferred embodiment of the present invention, a soybean protein or fragment thereof of the present invention is a homologue of mammalian protein. In another preferred embodiment of the present invention, a soybean protein or fragment thereof of the present invention is a homologue of a bacterial protein. In another preferred embodiment of the present invention, a soybean protein or fragment thereof of the present invention is a homologue of an algal protein. In another preferred embodiment of the present invention, a soybean protein or fragment thereof of the present invention is a homologue of a maize protein.

[0071] In a preferred embodiment of the present invention, the nucleic molecule of the present invention encodes a soybean protein or fragment thereof where a soybean protein or fragment thereof exhibits a BLAST probability score of greater than 1E-12, preferably a BLAST probability score of between about 1E-30 and about 1E-12, even more preferably a BLAST probability score of greater than 1E-30 with its homologue.

[0072] In another preferred embodiment of the present invention, the nucleic acid molecule encoding a soybean protein or fragment thereof exhibits a % identity with its homologue of between about 25% and about 40%, more preferably of between about 40 and about 70%, even more preferably of between about 70% and about 90% and even more preferably between about 90% and 99%. In another preferred embodiment, of the present invention, a soybean protein or fragment thereof exhibits a % identity with its homologue of 100%.

[0073] In a preferred embodiment of the present invention, the nucleic molecule of the present invention encodes a soybean protein or fragment thereof where the soybean protein exhibits a BLAST score of greater than 120, preferably a BLAST score of between about 1450 and about 120, even more preferably a BLAST score of greater than 1450 with its homologue.

[0074] Nucleic acid molecules of the present invention also include non-soybean homologues. Preferred non-soybean homologues are selected from the group consisting of alfalfa, Arabidopsis, barley, Brassica, broccoli, cabbage, citrus, cotton, garlic, oat, oilseed rape, onion, canola, flax, an ornamental plant, maize, pea, peanut, pepper, potato, rice, rye, sorghum, strawberry, sugarcane, sugarbeet, tomato, wheat, poplar, pine, fir, eucalyptus, apple, lettuce, lentils, grape, banana, tea, turf grasses, sunflower, oil palm and Phaseolus.

[0075] The degeneracy of the genetic code, which allows different nucleic acid sequences to code for the same protein or peptide, is known in the literature. (U.S. Pat. No. 4,757,006, the entirety of which is herein incorporated by reference).

[0076] In an aspect of the present invention, one or more of the nucleic acid molecules of the present invention differ in nucleic acid sequence from those encoding a soybean protein or fragment thereof in SEQ ID NO: 1 through SEQ ID NO: 1717 due to the degeneracy in the genetic code in that they encode the same protein but differ in nucleic acid sequence.

[0077] In another further aspect of the present invention, nucleic acid molecules of the present invention can comprise sequences, which differ from those encoding a protein or fragment thereof in SEQ ID NO: 1 through SEQ ID NO: 1717 due to fact that the different nucleic acid sequence encodes a protein having one or more conservative amino acid changes. It is understood that codons capable of coding for such conservative amino acid substitutions are known in the art.

[0078] It is well known in the art that one or more amino acids in a native sequence can be substituted with another amino acid(s), the charge and polarity of which are similar to that of the native amino acid, i.e., a conservative amino acid substitution, resulting in a silent change. Conserved substitutes for an amino acid within the native polypeptide sequence can be selected from other members of the class to which the naturally occurring amino acid belongs. Amino acids can be divided into the following four groups: (1) acidic amino acids, (2) basic amino acids, (3) neutral polar amino acids, and (4) neutral nonpolar amino acids. Representative amino acids within these various groups include, but are not limited to, (1) acidic (negatively charged) amino acids such as aspartic acid and glutamic acid; (2) basic (positively charged) amino acids such as arginine, histidine, and lysine; (3) neutral polar amino acids such as glycine, serine, threonine, cysteine, cystine, tyrosine, asparagine, and glutamine; and (4) neutral nonpolar (hydrophobic) amino acids such as alanine, leucine, isoleucine, valine, proline, phenylalanine, tryptophan, and methionine.

[0079] Conservative amino acid changes within the native polypeptides sequence can be made by substituting one amino acid within one of these groups with another amino acid within the same group. Biologically functional equivalents of the proteins or fragments thereof of the present invention can have 10 or fewer conservative amino acid changes, more preferably seven or fewer conservative amino acid changes, and most preferably five or fewer conservative amino acid changes. The encoding nucleotide sequence will thus have corresponding base substitutions, permitting it to encode biologically functional equivalent forms of the proteins or fragments of the present invention.

[0080] It is understood that certain amino acids may be substituted for other amino acids in a protein structure without appreciable loss of interactive binding capacity with structures such as, for example, antigent-binding regions of antibodies or binding sites on substrate molecules. Because it is the interactive capacity and nature of a protein that defines that protein's biological functional activity, certain amino acid sequence substitutions can be made in a protein sequence and, of course, its underlying DNA coding sequence and, nevertheless, obtain a protein with like properties. It is thus contemplated by the inventors that various changes may be made in the peptide sequences of the proteins or fragments of the present invention, or corresponding DNA sequences that encode said peptides, without appreciable loss of their biological utility or activity. It is understood that codons capable of coding for such amino acid changes are known in the art.

[0081] In making such changes, the hydropathic index of amino acids may be considered. The importance of the hydropathic amino acid index in conferring interactive biological function on a protein is generally understood in the art (Kyte and Doolittle, J. Mol. Biol. 157, 105-132 (1982), herein incorporated by reference in its entirety). It is accepted that the relative hydropathic character of the amino acid contributes to the secondary structure of the resultant protein, which in turn defines the interaction of the protein with other molecules, for example, enzymes, substrates, receptors, DNA, antibodies, antigens, and the like.

[0082] Each amino acid has been assigned a hydropathic index on the basis of its hydrophobicity and charge characteristics (Kyte and Doolittle, 1982); these are isoleucine (+4.5), valine (+4.2), leucine (+3.8), phenylalanine (+2.8), cysteine/cystine (+2.5), methionine (+1.9), alanine (+1.8), glycine (−0.4), threonine (−0.7), serine (−0.8), tryptophan (−0.9), tyrosine (−1.3), proline (−1.6), histidine (−3.2), glutamate (−3.5), glutamine (−3.5), aspartate (−3.5), asparagine (−3.5), lysine (−3.9), and arginine (−4.5).

[0083] In making such changes, the substitution of amino acids whose hydropathic indices are within ±2 is preferred, those which are within ±1 are particularly preferred, and those within ±0.5 are even more particularly preferred.

[0084] It is also understood in the art that the substitution of like amino acids can be made effectively on the basis of hydrophilicity. U.S. Pat. No. 4,554,101, incorporated herein by reference in its entirety, states that the greatest local average hydrophilicity of a protein, as govern by the hydrophilicity of its adjacent amino acids, correlates with a biological property of the protein.

[0085] As detailed in U.S. Pat. No. 4,554,101, the following hydrophilicity values have been assigned to amino acid residues: arginine (+3.0), lysine (+3.0), aspartate (+3.0±1), glutamate (+3.0±1), serine (+0.3), asparagine (+0.2), glutamine (+0.2), glycine (0), threonine (−0.4), proline (−0.5±1), alanine (−0.5), histidine (−0.5), cysteine (−1.0), methionine (−1.3), valine (−1.5), leucine (−1.8), isoleucine (−1.8), tyrosine (−2.3), phenylalanine (−2.5), and tryptophan (−3.4).

[0086] In making such changes, the substitution of amino acids whose hydrophilicity values are within ±2 is preferred, those which are within ±1 are particularly preferred, and those within ±0.5 are even more particularly preferred.

[0087] In a further aspect of the present invention, one or more of the nucleic acid molecules of the present invention differ in nucleic acid sequence from those encoding a soybean protein or fragment thereof set forth in SEQ ID NO: 1 through SEQ ID NO: 1717 or fragment thereof due to the fact that one or more codons encoding an amino acid has been substituted for a codon that encodes a nonessential substitution of the amino acid originally encoded.

[0088] One aspect of the present invention concerns markers that include nucleic acid molecules SEQ ID NO: 1 through SEQ ID NO: 1717 or complements thereof or fragments of either that can act as markers or other nucleic acid molecules of the present invention that can act as markers. Genetic markers of the present invention include “dominant” or “codominant” markers “Codominant markers” reveal the presence of two or more alleles (two per diploid individual) at a locus. “Dominant markers” reveal the presence of only a single allele per locus. The presence of the dominant marker phenotype (e.g., a band of DNA) is an indication that one allele is present in either the homozygous or heterozygous condition. The absence of the dominant marker phenotype (e.g. absence of a DNA band) is merely evidence that “some other” undefined allele is present. In the case of populations where individuals are predominantly homozygous and loci are predominately dimorphic, dominant and codominant markers can be equally valuable. As populations become more heterozygous and multi-allelic, codominant markers often become more informative of the genotype than dominant markers. Marker molecules can be, for example, capable of detecting polymorphisms such as single nucleotide polymorphisms (SNPs).

[0089] SNPs are single base changes in genomic DNA sequence. They occur at greater frequency and are spaced with a greater uniformity throughout a genome than other reported forms of polymorphism. The greater frequency and uniformity of SNPs means that there is greater probability that such a polymorphism will be found near or in a genetic locus of interest than would be the case for other polymorphisms. SNPs are located in protein-coding regions and noncoding regions of a genome. Some of these SNPs may result in defective or variant protein expression (e.g., as a results of mutations or defective splicing). Analysis (genotyping) of characterized SNPs can require only a plus/minus assay rather than a lengthy measurement, permitting easier automation.

[0090] SNPs can be characterized using any of a variety of methods. Such methods include the direct or indirect sequencing of the site, the use of restriction enzymes (Botstein et al., Am. J. Hum. Genet. 32:314-331 (1980); Konieczny and Ausubel, Plant J. 4:403-410 (1993); both of which are herein incorporated by reference in their entirety), enzymatic and chemical mismatch assays (Myers et al., Nature 313:495-498 (1985), herein incorporated by reference in its entirety), allele-specific PCR (Newton et al., Nucl. Acids Res. 17:2503-2516 (1989); Wu et al., Proc. Natl. Acad. Sci. (U.S.A.) 86:2757-2760 (1989); both of which are herein incorporated by reference in their entirety), ligase chain reaction (Barany, Proc. Natl. Acad. Sci. (U.S.A.) 88:189-193 (1991), herein incorporated by reference in its entirety), single-strand conformation polymorphism analysis (Labrune et al., Am. J. Hum. Genet. 48: 1115-1120 (1991), herein incorporated by reference in its entirety), primer-directed nucleotide incorporation assays (Kuppuswami et al., Proc. Natl. Acad. Sci. USA 88:1143-1147 (1991), herein incorporated by reference in its entirety), dideoxy fingerprinting (Sarkar et al., Genomics 13:441-443 (1992), herein incorporated by reference in its entirety), solid-phase ELISA-based oligonucleotide ligation assays (Nikiforov et al., Nucl. Acids Res. 22:4167-4175 (1994), herein incorporated by reference in its entirety), oligonucleotide fluorescence-quenching assays (Livak et al., PCR Methods Appl. 4:357-362 (1995), herein incorporated by reference in its entirety), 5′-nuclease allele-specific hybridization TaqMan assay (Livak et al., Nature Genet. 9:341-342 (1995), herein incorporated by reference in its entirety), template-directed dye-terminator incorporation (TDI) assay (Chen and Kwok, Nucl. Acids Res. 25:347-353 (1997), herein incorporated by reference in its entirety), allele-specific molecular beacon assay (Tyagi et al., Nature Biotech 16: 49-53 (1998), herein incorporated by reference in its entirety), PinPoint assay (Haff and Smimov, Genome Res. 7: 378-388 (1997), herein incorporated by reference in its entirety) and dCAPS analysis (Neff et al., Plant J. 14:387-392 (1998), herein incorporated by reference in its entirety).

[0091] Additional markers, such as AFLP markers, RFLP markers and RAPD markers, can be utilized (Walton, Seed World 22-29 (July, 1993); Burow and Blake, Molecular Dissection of Complex Traits, 13-29, Paterson (ed.), CRC Press, New York (1988); both of which are herein incorporated by reference in their entirety). DNA markers can be developed from nucleic acid molecules using restriction endonucleases, the PCR and/or DNA sequence information. RFLP markers result from single base changes or insertions/deletions. These codominant markers are highly abundant in plant genomes, have a medium level of polymorphism and are developed by a combination of restriction endonuclease digestion and Southern blotting hybridization. CAPS are similarly developed from restriction nuclease digestion but only of specific PCR products. These markers are also codominant, have a medium level of polymorphism and are highly abundant in the genome. The CAPS result from single base changes and insertions/deletions.

[0092] Another marker type, RAPDs, are developed from DNA amplification with random primers and result from single base changes and insertions/deletions in plant genomes. They are dominant markers with a medium level of polymorphisms and are highly abundant. AFLP markers require using the PCR on a subset of restriction fragments from extended adapter primers. These markers are both dominant and codominant are highly abundant in genomes and exhibit a medium level of polymorphism.

[0093] SSRs require DNA sequence information. These codominant markers result from repeat length changes, are highly polymorphic and do not exhibit as high a degree of abundance in the genome as CAPS, AFLPs and RAPDs, SNPs also require DNA sequence information. These codominant markers result from single base substitutions. They are highly abundant and exhibit a medium of polymorphism (Rafalski et al., In: Nonmammalian Genomic Analysis, Birren and Lai (ed.), Academic Press, San Diego, Calif., pp. 75-134 (1996), herein incorporated by reference in its entirety). It is understood that a nucleic acid molecule of the present invention may be used as a marker.

[0094] A PCR probe is a nucleic acid molecule capable of initiating a polymerase activity while in a double-stranded structure with another nucleic acid. Various methods for determining the structure of PCR probes and PCR techniques exist in the art. Computer generated searches using programs such as Primer3 (www-genome.wi.mit.edu/cgi-bin/primer/primer3.cgi), STSPipeline (www-genome.wi.mit.edu/cgi-bin/www-STS Pipeline), or GeneUp (Pesole et al., BioTechniques 25:112-123 (1998) the entirety of which is herein incorporated by reference), for example, can be used to identify potential PCR primers.

[0095] It is understood that a fragment of one or more of the nucleic acid molecules of the present invention may be a probe and specifically a PCR probe.

[0096] (b) Protein and Peptide Molecules

[0097] A class of agents comprises one or more of the protein or peptide molecules encoded by SEQ ID NO: 1 through SEQ ID NO: 1717 or one or more of the protein or fragment thereof or peptide molecules encoded by other nucleic acid agents of the present invention. As used herein, the term “protein molecule” or “peptide molecule” includes any molecule that comprises five or more amino acids. It is well know in the art that proteins may undergo modification, including post-translational modifications, such as, but not limited to, disulfide bond formation, glycosylation, phosphorylation, or oligomerization. Thus, as used herein, the term “protein molecule” or “peptide molecule” includes any protein molecule that is modified by any biological or non-biological process. The terms “amino acid” and “amino acids” refer to all naturally occurring L-amino acids. This definition is meant to include norleucine, ornithine, homocysteine, and homoserine.

[0098] One or more of the protein or fragment of peptide molecules may be produced via chemical synthesis, or more preferably, by expression in a suitable bacterial or eukaryotic host. Suitable methods for expression are described by Sambrook, et al., (In: Molecular Cloning, A Laboratory Manual, 2nd Edition, Cold Spring Harbor Press, Cold Spring Harbor, N.Y. (1989)), or similar texts.

[0099] A “protein fragment” is a peptide or polypeptide molecule whose amino acid sequence comprises a subset of the amino acid sequence of that protein. A protein or fragment thereof that comprises one or more additional peptide regions not derived from that protein is a “fusion” protein. Such molecules may be derivatized to contain carbohydrate or other moieties (such as keyhole limpet hemocyanin, etc.). Fusion protein or peptide molecule of the present invention are preferably produced via recombinant means.

[0100] Another class of agents comprise protein or peptide molecules encoded by SEQ ID NO: 1 through SEQ ID NO: 1717 or complements thereof or, fragments or fusions thereof in which non-essential, or not relevant, amino acid residues have been added, replaced, or deleted. An example of such a homologue is the homologue protein of all non-soybean plant species, including but not limited to alfalfa, Arabidopsis, barley, Brassica, broccoli, cabbage, citrus, cotton, garlic, oat, oilseed rape, onion, canola, flax, maize, an ornamental plant, pea, peanut, pepper, potato, rice, rye, sorghum, strawberry, sugarcane, sugarbeet, tomato, wheat, poplar, pine, fir, eukalyptus, apple, lettuce, peas, lentils, grape, banana, tea, turf grasses, etc. Particularly preferred non-soybean plants to utilize for the isolation of homologues would include alfalfa, Arabidopsis, barley, cotton, corn, oat, oilseed rape, rice, corn, canola, ornamentals, sugarcane, sugarbeet, tomato, potato, wheat, and turf grasses. Such a homologue can be obtained by any of a variety of methods. Most preferably, as indicated above, one or more of the disclosed sequences (SEQ ID NO: 1 through SEQ ID NO:1717 or complements thereof) will be used to define a pair of primers that may be used to isolate the homologue-encoding nucleic acid molecules from any desired species. Such molecules can be expressed to yield homologues by recombinant means.

[0101] (c) Antibodies

[0102] One aspect of the present invention concerns antibodies, single-chain antigen binding molecules, or other proteins that specifically bind to one or more of the protein or peptide molecules of the present invention and their homologues, fusions or fragments. Such antibodies may be used to quantitatively or qualitatively detect the protein or peptide molecules of the present invention. As used herein, an antibody or peptide is said to “specifically bind” to a protein or peptide molecule of the present invention if such binding is not competitively inhibited by the presence of non-related molecules.

[0103] Nucleic acid molecules that encode all or part of the protein of the present invention can be expressed, via recombinant means, to yield protein or peptides that can in turn be used to elicit antibodies that are capable of binding the expressed protein or peptide. Such antibodies may be used in immunoassays for that protein. Such protein-encoding molecules, or their fragments may be a “fusion” molecule (i.e., a part of a larger nucleic acid molecule) such that, upon expression, a fusion protein is produced. It is understood that any of the nucleic acid molecules of the present invention may be expressed, via recombinant means, to yield proteins or peptides encoded by these nucleic acid molecules.

[0104] The antibodies that specifically bind proteins and protein fragments of the present invention may be polyclonal or monoclonal, and may comprise intact immunoglobulins, or antigen binding portions of immunoglobulins (such as (F(ab′), F(ab′)₂) fragments, or single-chain immunoglobulins producible, for example, via recombinant means). It is understood that practitioners are familiar with the standard resource materials which describe specific conditions and procedures for the construction, manipulation and isolation of antibodies (see, for example, Harlow and Lane, In Antibodies: A Laboratory Manual, Cold Spring Harbor Press, Cold Spring Harbor, N.Y. (1988), the entirety of which is herein incorporated by reference).

[0105] Murine monoclonal antibodies are particularly preferred. BALB/c mice are preferred for this purpose, however, equivalent strains may also be used. The animals are preferably immunized with approximately 25 μg of purified protein (or fragment thereof) that has been emulsified a suitable adjuvant (such as TiterMax adjuvant (Vaxcel, Norcross, Ga.)). Immunization is preferably conducted at two intramuscular sites, one intraperitoneal site, and one subcutaneous site at the base of the tail. An additional i.v. injection of approximately 25 μg of antigen is preferably given in normal saline three weeks later. After approximately 11 days following the second injection, the mice may be bled and the blood screened for the presence of anti-protein or peptide antibodies. Preferably, a direct binding Enzyme-Linked Immunoassay (ELISA) is employed for this purpose.

[0106] More preferably, the mouse having the highest antibody titer is given a third i.v. injection of approximately 25 μg of the same protein or fragment. The splenic leukocytes from this animal may be recovered 3 days later, and are then permitted to fuse, most preferably, using polyethylene glycol, with cells of a suitable myeloma cell line (such as, for example, the P3X63Ag8.653 myeloma cell line). Hybridoma cells are selected by culturing the cells under “HAT” (hypoxanthine-aminopterin-thymine) selection for about one week. The resulting clones may then be screened for their capacity to produce monoclonal antibodies (“mAbs), preferably by direct ELISA.

[0107] In one embodiment, anti-protein or peptide monoclonal antibodies are isolated using a fusion of a protein, protein fragment, or peptide of the present invention, or conjugate of a protein, protein fragment, or peptide of the present invention, as immunogens. Thus, for example, a group of mice can be immunized using a fusion protein emulsified in Freund's complete adjuvant (e.g. approximately 50 μg of antigen per immunization). At three week intervals, an identical amount of antigen is emulsified in Freund's incomplete adjuvant and used to immunize the animals. Ten days following the third immunization, serum samples are taken and evaluated for the presence of antibody. If antibody titers are too low, a fourth booster can be employed. Polysera capable of binding the protein or peptide can also be obtained using this method.

[0108] In a preferred procedure for obtaining monoclonal antibodies, the spleens of the above-described immunized mice are removed, disrupted, and immune splenocytes are isolated over a ficoll gradient. The isolated splenocytes are fused, using polyethylene glycol with BALB/c-derived HGPRT (hypoxanthine guanine phosphoribosyl transferase) deficient P3x63xAg8.653 plasmacytoma cells. The fused cells are plated into 96-well microtiter plates and screened for hybridoma fusion cells by their capacity to grow in culture medium supplemented with hypothanthine, aminopterin and thymidine for approximately 2-3 weeks.

[0109] Hybridoma cells that arise from such incubation are preferably screened for their capacity to produce an immunoglobulin that binds to a protein of interest. An indirect ELISA may be used for this purpose. In brief, the supernatants of hybridomas are incubated in microtiter wells that contain immobilized protein. After washing, the titer of bound immunoglobulin can be determined using, for example, a goat anti-mouse antibody conjugated to horseradish peroxidase. After additional washing, the amount of immobilized enzyme is determined (for example through the use of a chromogenic substrate). Such screening is performed as quickly as possible after the identification of the hybridoma in order to ensure that a desired clone is not overgrown by non-secreting neighbors. Desirably, the fusion plates are screened several times since the rates of hybridoma growth vary. In a preferred sub-embodiment, a different antigenic form of immunogen may be used to screen the hybridoma. Thus, for example, the splenocytes may be immunized with one immunogen, but the resulting hybridomas can be screened using a different immunogen. It is understood that any of the protein or peptide molecules of the present invention may be used to raise antibodies.

[0110] As discussed below, such antibody molecules or their fragments may be used for diagnostic purposes. Where the antibodies are intended for diagnostic purposes, it may be desirable to derivatize them, for example with a ligand group (such as biotin) or a detectable marker group (such as a fluorescent group, a radioisotope or an enzyme).

[0111] The ability to produce antibodies that bind the protein or peptide molecules of the present invention permits the identification of mimetic compounds of those molecules. A “mimetic compound” is a compound that is not that compound, or a fragment of that compound, but which nonetheless exhibits an ability to specifically bind to antibodies directed against that compound.

[0112] It is understood that any of the agents of the present invention can be substantially purified and/or be biologically active and/or recombinant.

[0113] Uses of the Agents of the Invention

[0114] Nucleic acid molecules and fragments thereof of the present invention from libraries LIB3 and LIB4 are isolated from cotyledons from seedlings. Seedlings are a developmental phase in the growth process, therefore, the ESTs of the present invention can enable the acquisition of, including but not limited to, genes involved in seed germination, seedling development, and regulation of growth and development. The nucleic acid molecules of the present invention will find use in the isolation of a variety of agronomically significant genes, including but not limited to genes that regulate the synthesis and activity of proteins, amino acids, sterols, oils, minerals, isoflavones, saponins, trypsin inhibitors, vitamins, tocopherols, antinutrient components, carbohydrates, and starch metabolism, and seedling and vegetative regulatory elements. Such genes are associated with plant growth, quality, yield, and could also serve as links in important metabolic, developmental and catabolic pathways. The ESTs of the present invention will also find great use in the identification of genes important in initiating and maintaining seed germination, including but not limited to, genes encoding transcription factors and components of signal transduction including receptors and ion transporters and channels. The ESTs of the present invention will also further find great use in the identification of genes that may be used to mitigate stresses encountered during seed germination, including but not limited to, genes that encode heat shock factors, cold-induced proteins, and proteins required for anaerobic respiration and desiccation tolerance, and genes that regulate the synthesis and activity of those proteins.

[0115] The nucleic acid molecules and fragments thereof of the present invention from the cDNA libraries LIB5 and LIB6 are isolated from cotyledons and axis harvested from soybean seeds 6 hours after imbibition. The ESTs of the present invention can enable the acquisition of, including but not limited to, genes involved in seed germination, seedling development, and regulation of growth and development. Therefore, the ESTs of the present invention will find great use in the isolation of a variety of agronomically significant genes, including but not limited to, genes that regulate the synthesis and activity of proteins, amino acids, sterols, oils, minerals, isoflavones, saponins, trypsin inhibitors, vitamins, tocopherols, antinutrient components, carbohydrates, and starch metabolism. Such genes are associated with plant growth, quality, yield, and could also serve as links in metabolic and catabolic pathways. The ESTs of the present invention will also find great use in the identification of genes important in initiating and maintaining seed germination, including but not limited to, genes encoding transcription factors and components of signal transduction including receptors and ion transporters and channels. The ESTs of the present invention will also further find great use in the identification of genes that may be used to mitigate stresses encountered during seed germination, including but not limited to, genes that encode heat shock factors, cold-induced proteins, and proteins required for anaerobic respiration and desiccation tolerance, and genes that regulate the synthesis and activity of those proteins.

[0116] The nucleic acid molecules and fragments thereof of the present invention from the cDNA library LIB7 are isolated from soybean leaf tissue. Leaves are the carbohydrate factories of crop plants, therefore, the ESTs of the present invention will find great use in the isolation of a variety of agronomically significant genes, including but not limited to genes that are necessary for the interception and transformation of light energy via photosynthesis linked with plant growth, quality, and yield. Genes isolated utilizing the disclosed ESTs would also be critical in pathways including but not limited to a pathway such as nitrogen metabolism linked to fruiting and mobilization and distribution of nitrogen.

[0117] The nucleic acid molecules and fragments thereof of the present invention from the cDNA library LIB8 are isolated from soybean root tissue. Roots play a critical role in major vegetative organs which supply water, minerals, and substances essential for plant growth and development, therefore, the ESTs of the present invention will find great use in the isolation of a variety of agronomically significant genes, including but not limited to genes that are necessary for absorption, anchorage, storage, transport, propagation, and nitrogen fixation. Such crucial genes are associated with plant growth, quality, and yield and could also serve as links in important plant metabolic and catabolic pathways. The cDNA library of the present invention, LIB8, was constructed from root tissue isolated from soybean genotype A3244. This genotype has disease resistance to brown stem rot (Phialophora gregata) and Phytophthora root rot (Phytophthora sojae). The ESTs of the present invention will therefore find great use in the isolation of genes involved in disease resistance against a number of agronomically important fungal pathogens.

[0118] Nucleic acid molecules and fragments thereof of the present invention may be employed to obtain other nucleic acid molecules. Such molecules include the nucleic acid molecules of other plants or other organisms (e.g., alfalfa, rice, potato, cotton, oat, rye, barley, maize, wheat, Arabidopsis, Brassica, etc.) including the nucleic acid molecules that encode, in whole or in part, protein homologues of other plant species or other organisms, and sequences of genetic elements such as promoters and transcriptional regulatory elements. Such molecules can be readily obtained by using the above-described nucleic acid molecules or fragments thereof to screen cDNA or genomic libraries obtained from such plant species. Methods for forming such libraries are well known in the art. Such homologue molecules may differ in their nucleotide sequences from those found in one or more of SEQ ID NO:1 through SEQ ID NO:1717 or complements thereof because complete complementarity is not needed for stable hybridization. The nucleic acid molecules of the present invention therefore also include molecules that, although capable of specifically hybridizing with the nucleic acid molecules may lack “complete complementarity.”

[0119] Any of a variety of methods may be used to obtain one or more of the above-described nucleic acid molecules (Zamechik et al., Proc. Natl. Acad. Sci. (U.S.A.) 83:4143-4146 (1986); Goodchild et al., Proc. Natl. Acad. Sci. (U.S.A.) 85:5507-5511 (1988); Wickstrom et al., Proc. Natl. Acad. Sci. (U.S.A.) 85:1028-1032 (1988); Holt, et al., Molec. Cell. Biol. 8:963-973 (1988); Gerwirtz, et al., Science 242:1303-1306 (1988); Anfossi, et al., Proc. Natl. Acad. Sci. (U.S.A.) 86:3379-3383 (1989); Becker, et al., EMBO J. 8:3685-3691 (1989); all of which are herein incorporated by reference in their entirety). Automated nucleic acid synthesizers may be employed for this purpose. In lieu of such synthesis, the disclosed nucleic acid molecules may be used to define a pair of primers that can be used with the polymerase chain reaction (Mullis, et al., Cold Spring Harbor Symp. Quant. Biol. 51:263-273 (1986); Erlich et al., EP 50,424; EP 84,796, EP 258,017, EP 237,362; Mullis, EP 201,184; Mullis et al., U.S. Pat. No. 4,683,202; Erlich, U.S. Pat. No. 4,582,788; and Saiki, R. et al., U.S. Pat. No. 4,683,194, all of which are hereby incorporated by reference in their entirety) to amplify and obtain any desired nucleic acid molecule or fragment.

[0120] Promoter sequence(s) and other genetic elements including but not limited to transcriptional regulatory elements associated with one or more of the disclosed nucleic acid sequences can also be obtained using the disclosed nucleic acid sequences provided herein.

[0121] In one embodiment, such sequences are obtained by incubating EST nucleic acid molecules or preferably fragments thereof with members of genomic libraries (e.g. maize and soybean) and recovering clones that hybridize to the EST nucleic acid molecule or fragment thereof. In a second embodiment, methods of “chromosome walking,” or inverse PCR may be used to obtain such sequences (Frohman, et al., Proc. Natl. Acad. Sci. (U.S.A.) 85:8998-9002 (1988); Ohara, et al., Proc. Natl. Acad. Sci. (U.S.A.) 86: 5673-5677 (1989); Pang et al., Biotechniques, 22(6); 1046-1048 (1977); Huang et al., Methods Mol. Biol. 69: 89-96 (1977); Hartl et al, Methods Mol. Biol. 58: 293-301 (1996), all of which are hereby incorporated by reference in their entirety). In one embodiment, the disclosed nucleic acid molecules are used to identify cDNAs whose analogous genes contain promoters with desirable expression patterns. The nucleic acid molecules isolated from the library of the present invention are used to isolate promoters of tissue-enhanced, tissue-specific, developmentally- or environmentally-regulated expression profiles. Isolation and functional analysis of the 5′ flanking promoter sequences of these genes from genomic libraries, for example, using genomic screening methods and PCR techniques would result in the isolation of useful promoters and transcriptional regulatory elements. These methods are known to those of skill in the art and have been described (See for example Birren et al., Genome Analysis: Analyzing DNA, 1, (1997), Cold Spring Harbor Laboratory Press, Cold Spring Harbor, N.Y., the entirety of which is herein incorporated by reference).

[0122] Promoters obtained utilizing the nucleic acid molecules of the present invention could also be modified to affect their control characteristics. Examples of such modifications would include but are not limited to enhancer sequences as reported by Kay et al., Science 236:1299 (1987), herein incorporated by reference in its entirety. Such genetic elements could be used to enhance gene expression of new and existing traits for crop improvements.

[0123] The nucleic acid molecules of the present invention may be used to isolate promoters of tissue enhanced tissue specific, cell-specific, cell-type, developmentally or environmentally regulated expression profiles. Isolation and functional analysis of the 5′ flanking promoter sequences of these genes from genomic libraries, for example, using genomic screening methods and PCR techniques would result in the isolation of useful promoters and transcriptional regulatory elements. These methods are known to those of skill in the art and have been described (See, for example, Birren et. al., Genome Analysis: Analyzing DNA, 1, Cold Spring Harbor Laboratory Press, Cold Spring Harbor, N.Y. (1997), herein incorporated by reference in its entirety). Promoters obtained utilizing the nucleic acid molecules of the present invention could also be modified to affect their control characteristics. Examples of such modifications would include but are not limited to enhancer sequences as reported by Kay, et al Science 236:1299 (1987), herein incorporated reference in its entirety. Such genetic elements could be used to enhance gene expression of new and existing traits for crop improvements.

[0124] In an aspect of the present invention, one or more of the nucleic molecules of the present invention are used to determine whether a plant (preferably soybean) has a mutation affecting the level (i.e., the concentration of mRNA in a sample, etc.) or pattern (i.e., the kinetics of expression, rate of decomposition, stability profile, etc.) of the expression encoded in part or whole by one or more of the nucleic acid molecules of the present invention (collectively, the “Expression Response” of a cell or tissue). As used herein, the Expression Response manifested by a cell or tissue is said to be “altered” if it differs from the Expression Response of cells or tissues of plants not exhibiting the phenotype. To determine whether a Expression Response is altered, the Expression Response manifested by the cell or tissue of the plant exhibiting the phenotype is compared with that of a similar cell or tissue sample of a plant not exhibiting the phenotype. As will be appreciated, it is not necessary to re-determine the Expression Response of the cell or tissue sample of plants not exhibiting the phenotype each time such a comparison is made; rather, the Expression Response of a particular plant may be compared with previously obtained values of normal plants. As used herein, the phenotype of the organism is any of one or more characteristics of an organism (e.g. disease resistance, pest tolerance, environmental tolerance, male sterility, yield, quality improvements, etc.). A change in genotype or phenotype may be transient or permanent. Also as used herein, a tissue sample is any sample that comprises more than one cell. In a preferred aspect, a tissue sample comprises cells that share a common characteristic (e.g. derived from leaf, root, or pollen etc).

[0125] In one sub-aspect, such an analysis is conducted by determining the presence and/or identity of polymorphism(s) by one or more of the nucleic acid molecules of the present invention and more specifically, one or more of the EST nucleic acid molecules or fragments thereof which are associated with phenotype, or a predisposition to phenotype.

[0126] Any of a variety of molecules can be used to identify such polymorphism(s). In one embodiment, one or more of the EST nucleic acid molecules (or a sub-fragment thereof) may be employed as a marker nucleic acid molecule to identify such polymorphism(s). Alternatively, such polymorphisms can be detected through the use of a marker nucleic acid molecule or a marker protein that is genetically linked to (i.e., a polynucleotide that co-segregates with) such polymorphism(s).

[0127] In an alternative embodiment, such polymorphisms can be detected through the use of a marker nucleic acid molecule that is physically linked to such polymorphism(s). For this purpose, marker nucleic acid molecules comprising a nucleotide sequence of a polynucleotide located within 1 mb of the polymorphism(s), and more preferably within 100 kb of the polymorphism(s), and most preferably within 10 kb of the polymorphism(s) can be employed.

[0128] The genomes of animals and plants naturally undergo spontaneous mutation in the course of their continuing evolution (Gusella, Ann. Rev. Biochem. 55:831-854 (1986)). A “polymorphism” is a variation or difference in the sequence of the gene or its flanking regions that arises in some of the members of a species. The variant sequence and the “original” sequence co-exist in the species' population. In some instances, such co-existence is in stable or quasi-stable equilibrium.

[0129] A polymorphism is thus said to be “allelic,” in that, due to the existence of the polymorphism, some members of a species may have the original sequence (i.e., the original “allele”) whereas other members may have the variant sequence (i.e., the variant “allele”). In the simplest case, only one variant sequence may exist, and the polymorphism is thus said to be di-allelic. In other cases, the species' population may contain multiple alleles, and the polymorphism is termed tri-allelic, etc. A single gene may have multiple different unrelated polymorphisms. For example, it may have a di-allelic polymorphism at one site, and a multi-allelic polymorphism at another site.

[0130] The variation that defines the polymorphism may range from a single nucleotide variation to the insertion or deletion of extended regions within a gene. In some cases, the DNA sequence variations are in regions of the genome that are characterized by short tandem repeats (STRs) that include tandem di- or tri-nucleotide repeated motifs of nucleotides. Polymorphisms characterized by such tandem repeats are referred to as “variable number tandem repeat” (“VNTR”) polymorphisms. VNTRs have been used in identity analysis (Weber, U.S. Pat. No. 5,075,217; Armour, et al., FEBS Lett. 307:113-115 (1992); Jones, et al., Eur. J. Haematol. 39:144-147 (1987); Horn, et al., PCT Application WO91/14003; Jeffreys, European Patent Application 370,719; Jeffreys, U.S. Pat. No. 5,699,082; Jeffreys. et al., Amer. J. Hum. Genet. 39:11-24 (1986); Jeffreys. et al., Nature 316:76-79 (1985); Gray, et al., Proc. R. Acad. Soc. Lond. 243:241-253 (1991); Moore, et al., Genomics 10:654-660 (1991); Jeffreys, et al., Anim. Genet. 18:1-15 (1987); Hillel, et al., Anim. Genet. 20:145-155 (1989); Hillel, et al., Genet. 124:783-789 (1990), all of which are herein incorporated by reference in their entirety).

[0131] The detection of polymorphic sites in a sample of DNA may be facilitated through the use of nucleic acid amplification methods. Such methods specifically increase the concentration of polynucleotides that span the polymorphic site, or include that site and sequences located either distal or proximal to it. Such amplified molecules can be readily detected by gel electrophoresis or other means.

[0132] The most preferred method of achieving such amplification employs the polymerase chain reaction (“PCR”) (Mullis, et al., Cold Spring Harbor Symp. Quant. Biol. 51:263-273 (1986); Erlich, et al., European Patent Appln. 50,424; European Patent Appln. 84,796, European Patent Application 258,017, European Patent Appln. 237,362; Mullis, European Patent Appln. 201,184; Mullis, et al., U.S. Pat. No. 4,683,202; Erlich., U.S. Pat. No. 4,582,788; and Saiki, et al., U.S. Pat. No. 4,683,194, all of which are herein incorporated by reference), using primer pairs that are capable of hybridizing to the proximal sequences that define a polymorphism in its double-stranded form.

[0133] In lieu of PCR, alternative methods, such as the “Ligase Chain Reaction” (“LCR”) may be used (Barany, Proc. Natl. Acad. Sci. (U.S.A.) 88:189-193 (1991), the entirety of which is herein incorporated by reference). LCR uses two pairs of oligonucleotide probes to exponentially amplify a specific target. The sequences of each pair of oligonucleotides is selected to permit the pair to hybridize to abutting sequences of the same strand of the target. Such hybridization forms a substrate for a template-dependent ligase. As with PCR, the resulting products thus serve as a template in subsequent cycles and an exponential amplification of the desired sequence is obtained.

[0134] LCR can be performed with oligonucleotides having the proximal and distal sequences of the same strand of a polymorphic site. In one embodiment, either oligonucleotide will be designed to include the actual polymorphic site of the polymorphism. In such an embodiment, the reaction conditions are selected such that the oligonucleotides can be ligated together only if the target molecule either contains or lacks the specific nucleotide that is complementary to the polymorphic site present on the oligonucleotide. Alternatively, the oligonucleotides may be selected such that they do not include the polymorphic site (see, Segev, PCT Application WO 90/01069, the entirety of which is herein incorporated by reference).

[0135] The “Oligonucleotide Ligation Assay” (“OLA”) may alternatively be employed (Landegren, et al., Science 241:1071-1080 (1988), herein incorporated by reference in its entirety). The OLA protocol uses two oligonucleotides which are designed to be capable of hybridizing to abutting sequences of a single strand of a target. OLA, like LCR, is particularly suited for the detection of point mutations. Unlike LCR, however, OLA results in “linear” rather than exponential amplification of the target sequence.

[0136] Nickerson, et al. have described a nucleic acid detection assay that combines attributes of PCR and OLA (Nickerson, et al., Proc. Natl. Acad. Sci. (U.S.A.) 87:8923-8927 (1990), the entirety of which is herein incorporated by reference). In this method, PCR is used to achieve the exponential amplification of target DNA, which is then detected using OLA. In addition to requiring multiple, and separate, processing steps, one problem associated with such combinations is that they inherit all of the problems associated with PCR and, OLA.

[0137] Schemes based on ligation of two (or more) oligonucleotides in the presence of nucleic acid having the sequence of the resulting “di-oligonucleotide”, thereby amplifying the di-oligonucleotide, are also known (Wu, et al., Genomics 4:560 (1989), the entirety of which is herein incorporated by reference), and may be readily adapted to the purposes of the present invention.

[0138] Other known nucleic acid amplification procedures, such as allele-specific oligomers, branched DNA technology, transcription-based amplification systems, or isothermal amplification methods may also be used to amplify and analyze such polymorphisms (Malek, et al., U.S. Pat. No. 5,130,238; Davey, et al., European Patent Application 329,822; Schuster et al., U.S. Pat. No. 5,169,766; Miller, et al., PCT Application WO 89/06700, Kwoh, et al., Proc. Natl. Acad. Sci. (U.S.A.) 86:1173-1177 (1989); Gingeras, et al., PCT Application WO 88/10315; Walker, et al., Proc. Natl. Acad. Sci. (U.S.A.) 89:392-396 (1992), all of which are herein incorporated by reference in their entirety).

[0139] The identification of a polymorphism can be determined in a variety of ways. By correlating the presence or absence of it in a plant with the presence or absence of a phenotype, it is possible to predict the phenotype of that plant. If a polymorphism creates or destroys a restriction endonuclease cleavage site, or if it results in the loss or insertion of DNA (e.g., a VNTR polymorphism), it will alter the size or profile of the DNA fragments that are generated by digestion with that restriction endonuclease. As such, individuals that possess a variant sequence can be distinguished from those having the original sequence by restriction fragment analysis. Polymorphisms that can be identified in this manner are termed “restriction fragment length polymorphisms” (“RFLPs”). RFLPs have been widely used in human and plant genetic analyses (Glassberg, UK Patent Application 2135774; Skolnick, et al., Cytogen. Cell Genet. 32:58-67 (1982); Botstein, et al., Ann. J. Hum. Genet. 32:314-331 (1980); Fischer, et al. (PCT Application WO90/13668); Uhlen, PCT Application WO90/11369).

[0140] Polymorphisms can also be identified by Single Strand Conformation Polymorphism (SSCP) analysis. The SSCP technique is a method capable of identifying most sequence variations in a single strand of DNA, typically between 150 and 250 nucleotides in length (Elles, Methods in Molecular Medicine: Molecular Diagnosis of Genetic Diseases, Humana Press (1996); Orita et al., Genomics 5: 874-879 (1989); both of which are herein incorporated by reference in their entirety). Under denaturing conditions a single strand of DNA will adopt a conformation that is uniquely dependent on its sequence conformation. This conformation usually will be different, even if only a single base is changed. Most conformations have been reported to alter the physical configuration or size sufficiently to be detectable by electrophoresis. A number of protocols have been described for SSCP including, but not limited to Lee et al., Anal. Biochem. 205: 289-293 (1992), the entirety of which is herein incorporated by reference; Suzuki et al., Anal Biochem. 192: 82-84 (1991), the entirety of which is herein incorporated by reference; Lo et al., Nucleic Acids Research 20: 1005-1009 (1992), the entirety of which is herein incorporated by reference; Sarkar et al., Genomics 13: 441-443 (1992), the entirety of which is herein incorporated by reference). It is understood that one or more of the nucleic acids of the present invention, may be utilized as markers or probes to detect polymorphisms by SSCP analysis.

[0141] Polymorphisms may also be found using a DNA fingerprinting technique called amplified fragment length polymorphism (AFLP), which is based on the selective PCR amplification of restriction fragments from a total digest of genomic DNA to profile that DNA. Vos, et al., Nucleic Acids Res. 23:4407-4414 (1995), the entirety of which is herein incorporated by reference. This method allows for the specific co-amplification of high numbers of restriction fragments, which can be visualized by PCR without knowledge of the nucleic acid sequence.

[0142] AFLP employs basically three steps. Initially, a sample of genomic DNA is cut with restriction enzymes and oligonucleotide adapters are ligated to the restriction fragments of the DNA. The restriction fragments are then amplified using PCR by using the adapter and restriction sequence as target sites for primer annealing. The selective amplification is achieved by the use of primers that extend into the restriction fragments, amplifying only those fragments in which the primer extensions match the nucleotide flanking the restriction sites. These amplified fragments are then visualized on a denaturing polyacrylamide gel.

[0143] AFLP analysis has been performed on Salix (Beismann, et al., Mol. Ecol. 6:989-993 (1997), herein incorporated by reference in its entirety); Acinetobacter (Janssen, et al., Int J. Syst. Bacteriol 47:1179-1187 (1997), herein incorporated by reference in its entirety), Aeromonaspopoffi (Huys, et al., Int. J. Syst. Bacteriol 47:1165-1171 (1997), herein incorporated by reference in its entirety), rice (McCouch, et al., Plant Mol. Biol. 35:89-99 (1997); Nandi, et al., Mol. Gen. Genet. 255:1-8 (1997); Cho, et al., Genome 39:373-378 (1996), all of which are herein incorporated by reference in their entirety), barley (Hordeum vulgare) (Simons, et al., Genomics 44:61-70 (1997); Waugh, et al., Mol. Gen. Genet. 255:311-321 (1997); Qi, et al., Mol. Gen. Genet. 254:330-336 (1997); Becker, et al., Mol. Gen. Genet. 249:65-73 (1995), all of which are herein incorporated by reference in their entirety), potato (Van der Voort, et al., Mol. Gen. Genet. 255:438-447 (1997); Meksem, et al., Mol. Gen. Genet. 249:74-81 (1995), both of which are herein incorporated by reference in their entirety), Phytophthora infestans (Van der Lee, et al., Fungal Genet. Biol. 21:278-291 (1997), herein incorporated by reference in its entirety), Bacillus anthracis (Keim, et al., J. Bacteriol. 179:818-824 (1997), herein incorporated by reference in its entirety), Astragalus cremnophylax (Travis, et al., Mol. Ecol. 5:735-745 (1996), herein incorporated by reference in its entirety), Arabidopsis (Cnops, et al., Mol. Gen. Genet. 253:32-41 (1996), herein incorporated by reference in its entirety), Escherichia coli (Lin, et al., Nucleic Acids Res. 24:3649-3650 (1996), herein incorporated by reference in its entirety), Aeromonas (Huys, et al., Int. J. Syst. Bacteriol. 46:572-580 (1996), herein incorporated by reference in its entirety), nematode (Folkertsma, et al., Mol. Plant. Microbe Interact. 9:47-54 (1996), herein incorporated by reference in its entirety), tomato (Thomas, et al., Plant J. 8:785-794 (1995), herein incorporated by reference in its entirety), and human (Latorra, et al., PCR Methods Appl. 3:351-358 (1994), herein incorporated by reference in its entirety). AFLP analysis has also been used for fingerprinting mRNA (Money, et al., Nucleic Acids Res. 24:2616-2617 (1996); Bachem, et al., Plant J. 9:745-753 (1996), both of which are herein incorporated by reference in their entirety). It is understood that one or more of the nucleic acids of the present invention, may be utilized as markers or probes to detect polymorphisms by AFLP analysis for fingerprinting mRNA.

[0144] Polymorphisms may also be found using random amplified polymorphic DNA (RAPD) (Williams et al., Nucl. Acids Res. 18: 6531-6535 (1990), herein incorporated by reference in its entirety) and cleaveable amplified polymorphic sequences (CAPS) (Lyamichev et al., Science 260: 778-783 (1993), herein incorporated by reference in its entirety). It is understood that one or more of the nucleic acids of the present invention, may be utilized as markers or probes to detect polymorphisms by RAPD or CAPS analysis.

[0145] Polymorphisms are useful, through linkage analysis, to define the genetic distances or physical distances between polymorphic traits. A physical map or ordered array of genomic DNA fragments in the desired region containing the gene may be used to characterize and isolate genes corresponding to desirable traits. For this purpose, yeast artificial chromosomes (YACs), bacterial artificial chromosomes (BACs), and cosmids are appropriate vectors for cloning large segments of DNA molecules. Although fewer clones are needed to make a contig for a specific genomic region by using YACs (Agyare et al., Genome Res. 7: 1-9 (1997); James et al., Genomics 32: 425-430 (1996), both of which are herein incorporated by reference in their entirety), chimerism in the inserted DNA fragment can arise. Cosmids are convenient for handling smaller-size DNA molecules and may be used for transformation in developing transgenic plants. BACs also carry DNA fragments and are less prone to chimerism.

[0146] Through genetic mapping, a fine scale linkage map can be developed using DNA markers and, then, a genomic DNA library of large-sized fragments can be screened with molecular markers linked to the desired trait. Molecular markers are advantageous for agronomic traits that are otherwise difficult to tag, such as resistance to pathogens, insects and nematodes, tolerance to abiotic stress, quality parameters and quantitative traits such as high yield potential.

[0147] The essential requirements for marker-assisted selection in a plant breeding program are: (1) the marker(s) should co-segregate or be closely linked with the desired trait; (2) an efficient means of screening large populations for the molecular marker(s) should be available; and (3) the screening technique should have high reproducibility across laboratories and preferably be economical to use and be user-friendly.

[0148] The genetic linkage of marker molecules can be established by a gene mapping model such as, without limitation, the flanking marker model reported by Lander and Botstein, Genetics 121:185-199 (1989) and the interval mapping, based on maximum likelihood methods described by Lander and Botstein, Genetics 121:185-199 (1989) and implemented in the software package MAPMAKER/QTL (Lincoln and Lander, Mapping Genes Controlling Quantitative Traits Using MAPMAKER/QTL, Whitehead Institute for Biomedical Research, Massachusetts, (1990). Additional software includes Qgene, Version 2.23 (1996), Department of Plant Breeding and Biometry, 266 Emerson Hall, Cornell University, Ithaca, N.Y., the manual of which is herein incorporated by reference in its entirety). Use of Qgene software is a particularly preferred approach.

[0149] A maximum likelihood estimate (MLE) for the presence of a marker is calculated, together with an MLE assuming no QTL effect, to avoid false positives. A log₁₀ of an odds ratio (LOD) is then calculated as: LOD=log₁₀ (MLE for the presence of a QTL/MLE given no linked QTL).

[0150] The LOD score essentially indicates how much more likely the data are to have arisen assuming the presence of a QTL than in its absence. The LOD threshold value for avoiding a false positive with a given confidence, say 95%, depends on the number of markers and the length of the genome. Graphs indicating LOD thresholds are set forth in Lander and Botstein, Genetics 121:185-199 (1989) the entirety of which is herein incorporated by reference and further described by Anús and Moreno-González, Plant Breeding, Hayward et al., (eds.) Chapman & Hall, London, pp. 314-331 (1993), the entirety of which is herein incorporated by reference.

[0151] Additional models can be used. Many modifications and alternative approaches to interval mapping have been reported, including the use of non-parametric methods (Kruglyak and Lander, Genetics 139:1421-1428 (1995), the entirety of which is herein incorporated by reference). Multiple regression methods or models can be also be used, in which the trait is regressed on a large number of markers (Jansen, Biometrics in Plant Breeding, van Oijen and Jansen (eds.), Proceedings of the Ninth Meeting of the Eucarpia Section Biometrics in Plant Breeding, The Netherlands, pp. 116-124 (1994); Weber and Wricke, Advances in Plant Breeding, Blackwell, Berlin, 16 (1994), both of which are herein incorporated by reference in their entirety). Procedures combining interval mapping with regression analysis, whereby the phenotype is regressed onto a single putative QTL at a given marker interval and at the same time onto a number of markers that serve as ‘cofactors,’ have been reported by Jansen and Stam, Genetics 136:1447-1455 (1994), the entirety of which is herein incorporated by reference and Zeng, Genetics 136:1457-1468 (1994) the entirety of which is herein incorporated by reference. Generally, the use of cofactors reduces the bias and sampling error of the estimated QTL positions (Utz and Melchinger, Biometrics in Plant Breeding, van Oijen and Jansen (eds.) Proceedings of the Ninth Meeting of the Eucarpia Section Biometrics in Plant Breeding, The Netherlands, pp. 195-204 (1994), the entirety of which is herein incorporated by reference, thereby improving the precision and efficiency of QTL mapping (Zeng, Genetics 136:1457-1468 (1994)). These models can be extended to multi-environment experiments to analyze genotype-environment interactions (Jansen et al., Theo. Appl. Genet. 91:33-37 (1995), the entirety of which is herein incorporated by reference).

[0152] Selection of an appropriate mapping population is important to map construction. The choice of an appropriate mapping population depends on the type of marker systems employed (Tanksley et al., Molecular mapping plant chromosomes. Chromosome structure andfunction: Impact of new concepts, Gustafson and Appels (eds.), Plenum Press, New York, pp 157-173 (1988), the entirety of which is herein incorporated by reference). Consideration must be given to the source of parents (adapted vs. exotic) used in the mapping population. Chromosome pairing and recombination rates can be severely disturbed (suppressed) in wide crosses (adapted×exotic) and generally yield greatly reduced linkage distances. Wide crosses will usually provide segregating populations with a relatively large array of polymorphisms when compared to progeny in a narrow cross (adapted×adapted).

[0153] An F₂ population is the first generation of selfing after the hybrid seed is produced. Usually a single F₁ plant is selfed to generate a population segregating for all the genes in Mendelian (1:2:1) fashion. Maximum genetic information is obtained from a completely classified F₂ population using a codominant marker system (Mather, Measurement of Linkage in Heredity, Methuen and Co., (1938), the entirety of which is herein incorporated by reference). In the case of dominant markers, progeny tests (e.g. F₃, BCF₂) are required to identify the heterozygotes, thus making it equivalent to a completely classified F₂ population. However, this procedure is often prohibitive because of the cost and time involved in progeny testing. Progeny testing of F₂ individuals is often used in map construction where phenotypes do not consistently reflect genotype (e.g. disease resistance) or where trait expression is controlled by a QTL. Segregation data from progeny test populations (e.g. F₃ or BCF₂) can be used in map construction. Marker-assisted selection can then be applied to cross progeny based on marker-trait map associations (F₂, F₃), where linkage groups have not been completely disassociated by recombination events (i.e., maximum disequillibrium).

[0154] Recombinant inbred lines (RIL) (genetically related lines; usually >F₅, developed from continuously selfing F₂ lines towards homozygosity) can be used as a mapping population. Information obtained from dominant markers can be maximized by using RIL because all loci are homozygous or nearly so. Under conditions of tight linkage (i.e., about <10% recombination), dominant and co-dominant markers evaluated in RIL populations provide more information per individual than either marker type in backcross populations (Reiter et al., Proc. Natl. Acad. Sci. (U.S.A.) 89:1477-1481 (1992), the entirety of which is herein incorporated by reference). However, as the distance between markers becomes larger (i.e., loci become more independent), the information in RIL populations decreases dramatically when compared to codominant markers.

[0155] Backcross populations (e.g., generated from a cross between a successful variety (recurrent parent) and another variety (donor parent) carrying a trait not present in the former) can be utilized as a mapping population. A series of backcrosses to the recurrent parent can be made to recover most of its desirable traits. Thus a population is created consisting of individuals nearly like the recurrent parent but each individual carries varying amounts or mosaic of genomic regions from the donor parent. Backcross populations can be useful for mapping dominant markers if all loci in the recurrent parent are homozygous and the donor and recurrent parent have contrasting polymorphic marker alleles (Reiter et al., Proc. Natl. Acad. Sci. (U.S.A.) 89:1477-1481 (1992)). Information obtained from backcross populations using either codominant or dominant markers is less than that obtained from F₂ populations because one, rather than two, recombinant gametes are sampled per plant. Backcross populations, however, are more informative (at low marker saturation) when compared to RILs as the distance between linked loci increases in RIL populations (i.e. about 15% recombination). Increased recombination can be beneficial for resolution of tight linkages, but may be undesirable in the construction of maps with low marker saturation.

[0156] Near-isogenic lines (NIL) created by many backcrosses to produce an array of individuals that are nearly identical in genetic composition except for the trait or genomic region under interrogation can be used as a mapping population. In mapping with NILs, only a portion of the polymorphic loci are expected to map to a selected region.

[0157] Bulk segregant analysis (BSA) is a method developed for the rapid identification of linkage between markers and traits of interest (Michelmore et al., Proc. Natl. Acad. Sci. (U.S.A.) 88:9828-9832 (1991), the entirety of which is herein incorporated by reference). In BSA, two bulked DNA samples are drawn from a segregating population originating from a single cross. These bulks contain individuals that are identical for a particular trait (resistant or susceptible to particular disease) or genomic region but arbitrary at unlinked regions (i.e. heterozygous). Regions unlinked to the target region will not differ between the bulked samples of many individuals in BSA.

[0158] It is understood that one or more of the nucleic acid molecules of the present invention may be used as molecular markers. It is also understood that one or more of the protein molecules of the present invention may be used as molecular markers.

[0159] In accordance with this aspect of the present invention, a sample nucleic acid is obtained from plants cells or tissues. Any source of nucleic acid may be used. Preferably, the nucleic acid is genomic DNA. The nucleic acid is subjected to restriction endonuclease digestion. For example, one or more EST nucleic acid molecule or fragment thereof can be used as a probe in accordance with the above-described polymorphic methods. The polymorphism obtained in this approach can then be cloned to identify the mutation at the coding region which alters the protein's structure or regulatory region of the gene which affects its expression level.

[0160] In one aspect of the present invention, an evaluation can be conducted to determine whether a particular mRNA molecule is present. One or more of the nucleic acid molecules of the present invention, preferably one or more of the EST nucleic acid molecules of the present invention are utilized to detect the presence or quantity of the mRNA species. Such molecules are then incubated with cell or tissue extracts of a plant under conditions sufficient to permit nucleic acid hybridization. The detection of double-stranded probe-mRNA hybrid molecules is indicative of the presence of the mRNA; the amount of such hybrid formed is proportional to the amount of mRNA. Thus, such probes may be used to ascertain the level and extent of the mRNA production in a plant's cells or tissues. Such nucleic acid hybridization may be conducted under quantitative conditions (thereby providing a numerical value of the amount of the mRNA present). Alternatively, the assay may be conducted as a qualitative assay that indicates either that the mRNA is present, or that its level exceeds a user set, predefined value.

[0161] A principle of in situ hybridization is that a labeled, single-stranded nucleic acid probe will hybridize to a complementary strand of cellular DNA or RNA and, under the appropriate conditions, these molecules will form a stable hybrid. When nucleic acid hybridization is combined with histological techniques, specific DNA or RNA sequences can be identified within a single cell. An advantage of in situ hybridization over more conventional techniques for the detection of nucleic acids is that it allows an investigator to determine the precise spatial population (Angerer et al., Dev. Biol. 101: 477-484 (1984); Angerer et al., Dev. Biol. 112: 157-166 (1985); Dixon et al., EMBO J. 10: 1317-1324 (1991), all of which are herein incorporated by reference in their entirety). In situ hybridization may be used to measure the steady-state level of RNA accumulation. It is a sensitive technique and RNA sequences present in as few as 5-10 copies per cell can be detected (Hardin et al., J. Mol. Biol. 202: 417-431. (1989), the entirety of which is herein incorporated by reference). A number of protocols have been devised for in situ hybridization, each with tissue preparation, hybridization, and washing conditions (Meyerowitz, Plant Mol. Biol. Rep. 5: 242-250 (1987); Cox and Goldberg, In: Plant Molecular Biology: A Practical Approach (ed. C. H. Shaw), pp. 1-35. IRL Press, Oxford (1988); Raikhel et al., In situ RNA hybridization in plant tissues. In Plant Molecular Biology Manual, vol. B9: 1-32. Kluwer Academic Publisher, Dordrecht, Belgium (1989), all of which are herein incorporated by reference in their entirety).

[0162] In situ hybridization also allows for the localization of proteins within a tissue or cell (Wilkinson, In Situ Hybridization, Oxford University Press, Oxford (1992); Langdale, In Situ Hybridization 165-179 In: The Maize Handbook, eds. Freeling and Walbot, Springer-Verlag, New York (1994), both of which are herein incorporated by reference in their entirety). It is understood that one or more of the molecules of the present invention, preferably one or more of the EST nucleic acid molecules of the present invention or one or more of the antibodies of the present invention may be utilized to detect the level or pattern of a protein or fragment thereof by in situ hybridization.

[0163] Fluorescent in situ hybridization also enables the localization of a particular DNA sequence along a chromosome which is useful, among other uses, for gene mapping, following chromosomes in hybrid lines or detecting chromosomes with translocations, transversions or deletions. In situ hybridization has been used to identify chromosomes in several plant species (Griffor et al., Plant Mol. Biol. 17: 101-109 (1991); Gustafson et al., Proc. Nat'l. Acad. Sci. (U.S.A.). 87:1899-1902 (1990); Mukai and Gill, Genome 34: 448-452. (1991); Schwarzacher and Heslop-Harrison, Genome 34: 317-323 (1991); Wang et al., Jpn. J. Genet. 66: 313-316 (1991); Parra and Windle, Nature Genetics, 5: 17-21 (1993), all of which are herein incorporated by reference in their entirety). It is understood that the nucleic acid molecules of the present invention may be used as probes or markers to localize sequences along a chromosome.

[0164] It is also understood that one or more of the molecules of the present invention, preferably one or more of the EST nucleic acid molecules of the present invention or one or more of the antibodies of the present invention may be utilized to detect the expression level or pattern of a protein or mRNA thereof by in situ hybridization.

[0165] Another method to localize the expression of a molecule is tissue printing. Tissue printing provides a way to screen, at the same time on the same membrane many tissue sections from different plants or different developmental stages. Tissue-printing procedures utilize films designed to immobilize proteins and nucleic acids. In essence, a freshly cut section of an organ is pressed gently onto nitrocellulose paper, nylon membrane or polyvinylidene difluoride membrane. Such membranes are commercially available (e.g. Millipore, Bedford, Mass.). The contents of the cut cell transfer onto the membrane, and the molecules are immobilized to the membrane. The immobilized molecules form a latent print that can be visualized with appropriate probes. When a plant tissue print is made on nitrocellulose paper, the cell walls leave a physical print that makes the anatomy visible without further treatment (Varner and Taylor, Plant Physiol. 91: 31-33 (1989), the entirety of which is herein incorporated by reference).

[0166] Tissue printing on substrate films is described by Daoust, Exp. Cell Res. 12: 203-211 (1957), the entirety of which is herein incorporated by reference, who detected amylase, protease, ribonuclease, and deoxyribonuclease in animal tissues using starch, gelatin, and agar films. These techniques can be applied to plant tissues (Yomo and Taylor, Planta 112:35-43 (1973); Harris and Chrispeels, Plant Physiol. 56: 292-299 (1975). Advances in membrane technology have increased the range of applications of Daoust's tissue-printing techniques allowing (Cassab and Varner, J. Cell. Biol. 105: 2581-2588 (1987), the entirety of which is herein incorporated by reference; the histochemical localization of various plant enzymes and deoxyribonuclease on nitrocellulose paper and nylon (Spruce et al., Phytochemistry, 26: 2901-2903 (1987); Barres et al. Neuron 5: 527-544 (1990); Reid and Pont-Lezica, Tissue Printing. Tools for the Study of Anatomy, Histochemistry, and Gene Expression, Academic Press, New York, N.Y. (1992); Reid et al. Plant Physiol. 93: 160-165 (1990); Ye et al. Plant J. 1: 175-183 (1991), all of which are herein incorporated by reference in their entirety).

[0167] It is understood that one or more of the molecules of the present invention, preferably one or more of the EST nucleic acid molecules of the present invention or one or more of the antibodies of the present invention may be utilized to detect the presence or quantity of a protein by tissue printing.

[0168] Further, it is also understood that any of the nucleic acid molecules of the present invention may be used as marker nucleic acids and or probes in connection with methods that require probes or marker nucleic acids. As used herein, a probe is an agent that is utilized to determine an attribute or feature (e.g. presence or absence, location, correlation, etc.) or a molecule, cell, tissue or plant. As used herein, a marker nucleic acid is a nucleic acid molecule that is utilized to determine an attribute or feature (e.g., presence or absence, location, correlation, etc.) or a molecule, cell, tissue or plant.

[0169] A microarray-based method for high-throughput monitoring of plant gene expression may be utilized to measure gene-specific hybridization targets. This ‘chip’-based approach involves using microarrays of nucleic acid molecules as gene-specific hybridization targets to quantitatively measure expression of the corresponding plant genes (Schena et al., Science 270: 467-470 (1995); Shalon, Ph.D. Thesis. Stanford University (1996), both of which are herein incorporated by reference in their entirety). Every nucleotide in a large sequence can be queried at the same time. Hybridization can be used to efficiently analyze large amounts of nucleotide sequence.

[0170] Several microarray methods have been described. One method compares the sequences to be analyzed by hybridization to a set of oligonucleotides representing all possible subsequences (Bains and Smith, J. Theor. Biol. 135: 303 (1989), the entirety of which is herein incorporated by reference). A second method hybridizes the sample to an array of oligonucleotide probes. An array consisting of oligonucleotides complementary to subsequences of a target sequence can be used to determine the identity of a target sequence, measure its amount, and detect differences between the target and a reference sequence. Nucleic acid molecules microarrays may also be screened with protein molecules or fragments thereof to determine nucleic acid molecules that specifically bind protein molecules or fragments thereof.

[0171] The microarray approach may be used with polypeptide targets (U.S. Pat. No. 5,445,934; U.S. Pat. No. 5,143,854; U.S. Pat. No. 5,079,600; U.S. Pat. No. 4,923,901, all of which are herein incorporated by reference in their entirety). Essentially, polypeptides are synthesized on a substrate (microarray) and these polypeptides can be screened with either protein molecules or fragments thereof or nucleic acid molecules in order to screen for either protein molecules or fragments thereof or nucleic acid molecules that specifically bind the target polypeptides. Implementation of these techniques rely on recently developed combinatorial technologies to generate any ordered array of a large number of oligonucleotide probes (Fodor et al., Science 251:767-773 (1991), the entirety of which is herein incorporated by reference).

[0172] It is understood that one or more of the molecules of the present invention, preferably one or more of the nucleic acid molecules or protein molecules or fragments thereof of the present invention may be utilized in a microarray based method.

[0173] In a preferred embodiment of the present invention microarrays may be prepared that comprise nucleic acid molecules where preferably at least 10%, preferably at least 25%, more preferably at least 50% and even more preferably at least 75%, 80%, 85%, 90% or 95% of the nucleic acid molecules located on that array are selected from the group of nucleic acid molecules that specifically hybridize to one or more nucleic acid molecule having a nucleic acid sequence selected from the group of SEQ ID NO: 1 through SEQ ID NO: 1717 or complement thereof or fragments of either.

[0174] A particular preferred microarray embodiment of the present invention is a microarray comprising nucleic acid molecules encoding genes or fragments thereof that are homologues of known genes or nucleic acid molecules that comprise genes or fragment thereof that elicit only limited or no matches to known genes. A further preferred microarray embodiment of the present invention is a microarray comprising nucleic acid molecules having genes or fragments thereof that are homologues of known genes and nucleic acid molecules that comprise genes or fragment thereof that elicit only limited or no matches to known genes. Site-directed mutagenesis may be utilized to modify nucleic acid sequences, particularly as it is a technique that allows one or more of the amino acids encoded by a nucleic acid molecule to be altered (e.g. a threonine to be replaced by a methionine). Three basic methods for site-directed mutagenesis' are often employed. These are cassette mutagenesis (Wells et al., Gene 34:315-23 (1985), the entirety of which is herein incorporated by reference), primer extension (Gilliam et al., Gene 12:129-137 (1980), the entirety of which is herein incorporated by reference); Zoller and Smith, Methods Enzymol. 100:468-500 (1983), the entirety of which is herein incorporated by reference; and Dalbadie-McFarland et al., Proc. Natl. Acad. Sci. (U.S.A.) 79:6409-6413 (1982), the entirety of which is herein incorporated by reference) and methods based upon PCR (Scharf et al., Science 233:1076-1078 (1986), the entirety of which is herein incorporated by reference; Higuchi et al., Nucleic Acids Res. 16:7351-7367 (1988), the entirety of which is herein incorporated by reference). Site-directed mutagenesis approaches are also described in European Patent 0 385 962, the entirety of which is herein incorporated by reference, European Patent 0 359 472, the entirety of which is herein incorporated by reference, and PCT Patent Application WO 93/07278, the entirety of which is herein incorporated by reference.

[0175] Site-directed mutagenesis strategies have been applied to plants for both in vitro as well as in vivo site-directed mutagenesis (Lanz et al., J. Biol. Chem. 266:9971-6 (1991); Kovgan and Zhdanov, Biotekhnologiya 5:148-154; No. 207160n, Chemical Abstracts 110:225 (1989); Ge et al., Proc. Natl. Acad. Sci. (U.S.A.) 86:4037-4041 (1989); Zhu et al., J. Biol. Chem. 271:18494-18498 (1996); Chu et al., Biochemistry 33:6150-6157 (1994); Small et al., EMBO J. 11: 1291-1296 (1992); Cho et al., Mol. Biotechnol. 8:13-16 (1997); Kita et al., J. Biol. Chem. 271:26529-26535 (1996); Jin et al., Mol. Microbiol. 7:555-562 (1993); Hatfield and Vierstra, J. Biol. Chem. 267:14799-14803 (1992); Zhao et al., Biochemistry 31:5093-5099 (1992), all of which are herein incorporated by reference in their entirety).

[0176] Any of the nucleic acid molecules of the present invention may either be modified by site-directed mutagenesis or used as, for example, nucleic acid molecules that are used to target other nucleic acid molecules for modification. It is understood that mutants with more than one altered nucleotide can be constructed using techniques that practitioners skilled in the art are familiar with such as isolating restriction fragments and ligating such fragments into an expression vector (see, for example, Sambrook et al., Molecular Cloning: A Laboratory Manual, Cold Spring Harbor Press (1989)).

[0177] Sequence-specific DNA-binding proteins play a role in the regulation of transcription. The isolation of recombinant cDNAs encoding these proteins facilitates the biochemical analysis of their structural and functional properties. Genes encoding such DNA-binding proteins have been isolated using classical genetics (Vollbrecht et al., Nature 350: 241-243 (1991), the entirety of which is herein incorporated by reference) and molecular biochemical approaches, including the screening of recombinant cDNA libraries with antibodies (Landschulz et al., Genes Dev. 2: 786-800 (1988), the entirety of which is herein incorporated by reference) or DNA probes (Bodner et al., Cell 55: 505-518 (1988), the entirety of which is herein incorporated by reference). In addition, an in situ screening procedure has been used and has facilitated the isolation of sequence-specific DNA-binding proteins from various plant species (Gilmartin et al., Plant Cell 4: 839-849 (1992); Schindler et al., EMBO J. 11: 1261-1273 (1992), both of which are herein incorporated by reference in their entirety). An in situ screening protocol does not require the purification of the protein of interest (Vinson et al., Genes Dev. 2: 801-806 (1988); Singh et al., Cell 52: 415-423 (1988), both of which are herein incorporated by reference in their entirety).

[0178] Steps may be employed to characterize DNA-protein interactions. The first is to identify promoter fragments that interact with DNA-binding proteins, to titrate binding activity, to determine the specificity of binding, and to determine whether a given DNA-binding activity can interact with related DNA sequences (Sambrook et al., Molecular Cloning: A Laboratory Manual, 2^{nd} edition. Cold Spring Harbor Laboratory Press, Cold Spring Harbor, N.Y. (1989). Electrophoretic mobility-shift assay is a widely used assay. The assay provides a simple, rapid, and sensitive method for detecting DNA-binding proteins based on the observation that the mobility of a DNA fragment through a nondenaturing, low-ionic strength polyacrylamide gel is retarded upon association with a DNA-binding protein (Fried and Crother, Nucleic Acids Res. 9: 6505-6525 (1981), the entirety of which is herein incorporated by reference). When one or more specific binding activities have been identified, the exact sequence of the DNA bound by the protein may be determined. Several procedures for characterizing protein/DNA-binding sites are used, including methylation and ethylation interference assays (Maxam and Gilbert, Methods Enzymol. 65: 499-560 (1980); Wissman and Hillen, Methods Enzymol. 208: 365-379 (1991), both of which are herein incorporated by reference in their entirety) and footprinting techniques employing DNase I (Galas and Schmitz, Nucleic Acids Res. 5: 3157-3170 (1978), herein incorporated by reference in its entirety), 1,10-phenanthroline-copper ion methods (Sigman et al., Methods Enzymol. 208: 365-379 (1991), herein incorporated by reference in its entirety) or hydroxyl radical methods (Dixon et al., Methods Enzymol. 208: 380-413 (1991), herein incorporated by reference in its entirety). It is understood that one or more of the nucleic acid molecules of the present invention, preferably one or more of the EST nucleic acid molecules of the present invention may be utilized to identify a protein or fragment thereof that specifically binds to a nucleic acid molecule of the present invention. It is also understood that one or more of the protein molecules or fragments thereof of the present invention may be utilized to identify a nucleic acid molecule that specifically binds to it.

[0179] The two-hybrid system is based on the fact that many cellular functions are carried out by proteins that interact (physically) with one another. Two-hybrid systems have been used to probe the function of new proteins (Chien et al., Proc. Natl. Acad. Sci. (U.S.A.) 88: 9578-9582 (1991); Durfee et al., Genes Dev. 7: 555-569 (1993); Choi et al., Cell 78: 499-512 (1994); Kranz et al., Genes Dev. 8: 313-327 (1994), all of which are herein incorporated by reference in their entirety).

[0180] Interaction mating techniques have facilitated a number of two-hybrid studies of protein-protein interaction. Interaction mating has been used to examine interactions between small sets of tens of proteins (Finley and Brent, Proc. Natl. Acad. Sci. (U.S.A.) 91: 12098-12984 (1994), herein incorporated by reference in its entirety), larger sets of hundreds of proteins, (Bendixen et al., Nucl. Acids Res. 22: 1778-1779 (1994), herein incorporated by reference in its entirety) and to comprehensively map proteins encoded by a small genome (Bartel et al., Nature Genetics 12: 72-77 (1996), herein incorporated by reference in its entirety). This technique utilizes proteins fused to the DNA-binding domain and proteins fused to the activation domain. They are expressed in two different haploid yeast strains of opposite mating type, and the strains are mated to determine if the two proteins interact. Mating occurs when haploid yeast strains come into contact and result in the fusion of the two haploids into a diploid yeast strain. An interaction can be determined by the activation of a two-hybrid reporter gene in the diploid strain. The primary advantage of this technique is that it reduces the number of yeast transformations needed to test individual interactions. It is understood that the protein-protein interactions of protein or fragments thereof of the present invention may be investigated using the two-hybrid system and that any of the nucleic acid molecules of the present invention that encode such proteins or fragments thereof may be used to transform yeast in the two-hybrid system.

[0181] Synechocystis 6803 is a photosynthetic Cyanobacterium capable of oxygenic photosynthesis as well as heterotrophic growth in the absence of light. The entire genome has been sequenced, and it is reported to have a circular genome size of 3.57 Mbp containing 3168 potential open reading frames. Open reading frames (ORFs) were identified based upon their homology to other reported ORFs and by using ORF identification computer programs. Sixteen hundred potential ORFs were assigned based on their homology to previously identified ORFs. Of these 1600 ORFs, 145 were identical to reported ORFs (Kaneko et al., DNA Research 3:109-36 (1996), herein incorporated by reference in its entirety).

[0182] Several prokaryote promoters have been used in Synechocystis to express heterologous genes including the tac, lac, and lambda phage promoters (Bryant (ed.), The Molecular Biology of Cyanobacteria, Kluwer Academic Publishers, (1994); Ferino and Chauvat, Gene 84:257-266 (1989), both of which are herein incorporated by reference in their entirety). Several bacterial origins of replication such as RSF 1010 and ACYC are reported to replicate in Synechocystis (Mermet-Bouvier and Chauvat, Current Microbiology 28:145-148 (1994); Kuhlemeier et al., Mol. Gen. Genet. 184:249-254 (1981), both of which are herein incorporated by reference in their entirety).

[0183] Synechocystis has been used to study gene regulation by gene replacement through homologous recombination or by gene disruption using antibiotic resistance markers (Pakrasi et al., EMBO 7:325-332 (1988), herein incorporated by reference in its entirety). In such gene regulation studies, double, reciprocal homologous regions of the host genome flanking the gene of interest recombine to stably integrate the gene of interest into the genome. The gene of interest can be expressed once that gene has been stably integrated into the genome. Biochemical analysis can be performed to study the effect of the replaced or deleted gene.

[0184] It is understood that the agents of the present invention may be employed in a Synechocystis system.

[0185] Exogenous genetic material may be transferred into a plant cell and the plant cell regenerated into a whole, fertile or sterile plant. Exogenous genetic material is any genetic material, whether naturally occurring or otherwise, from any source that is capable of being inserted into any organism. Such genetic material may be transferred into either monocotyledons and dicotyledons including but not limited to the crops, maize and soybean (See specifically, Chistou, Particle Bombardment for Genetic Engineering of Plants, pp 63-69 (maize), pp 50-60 (soybean), Biotechnology Intelligence Unit. Academic Press, San Diego, Calif. (1996), the entirety of which is herein incorporated by reference and generally Chistou, Particle Bombardment for Genetic Engineering of Plants, Biotechnology Intelligence Unit. Academic Press, San Diego, Calif. (1996), the entirety of which is herein incorporated by reference).

[0186] Transfer of a nucleic acid that encodes for a protein can result in overexpression of that protein in a transformed cell or transgenic plant. One or more of the proteins or fragments thereof encoded by nucleic acid molecules of the present invention may be overexpressed in a transformed cell or transformed plant. Such overexpression may be the result of transient or stable transfer of the exogenous material.

[0187] Exogenous genetic material may be transferred into a plant cell by the use of a DNA vector or construct designed for such a purpose. Design of such a vector is generally within the skill of the art (See, Plant Molecular Biology: A Laboratory Manual eds. Clark, Springer, New York (1997), herein incorporated by reference in its entirety).

[0188] A construct or vector may include a plant promoter to express the protein or protein fragment of choice. A number of promoters which are active in plant cells have been described in the literature. These include the nopaline synthase (NOS) promoter (Ebert et al., Proc. Natl. Acad. Sci. (U.S.A.) 84:5745-5749 (1987), herein incorporated by reference in its entirety), the octopine synthase (OCS) promoter (which are carried on tumor-inducing plasmids of Agrobacterium tumefaciens), the caulimovirus promoters such as the cauliflower mosaic virus (CaMV) 19S promoter (Lawton et al., Plant Mol. Biol. 9:315-324 (1987), herein incorporated by reference in its entirety) and the CAMV 35S promoter (Odell et al., Nature 313:810-812 (1985), herein incorporated by reference in its entirety), the figwort mosaic virus 35S-promoter, the light-inducible promoter from the small subunit of ribulose-1,5-bis-phosphate carboxylase (ssRUBISCO), the Adh promoter (Walker et al., Proc. Natl. Acad. Sci. (U.S.A.) 84:6624-6628 (1987), herein incorporated by reference in its entirety), the sucrose synthase promoter (Yang et al., Proc. Natl. Acad. Sci. (U.S.A.) 87:4144-4148 (1990), herein incorporated by reference in its entirety), the R gene complex promoter (Chandler et al., The Plant Cell 1:1175-1183 (1989), herein incorporated by reference in its entirety), and the chlorophyll a/b binding protein gene promoter, etc. These promoters have been used to create DNA constructs which have been expressed in plants; see, e.g., PCT publication WO 84/02913, herein incorporated by reference in its entirety.

[0189] Promoters which are known or are found to cause transcription of DNA in plant cells can be used in the present invention. Such promoters may be obtained from a variety of sources such as plants and plant viruses. It is preferred that the particular promoter selected should be capable of causing sufficient expression to result in the production of an effective amount of a protein to cause the desired phenotype. In addition to promoters which are known to cause transcription of DNA in plant cells, other promoters may be identified for use in the current invention by screening a plant cDNA library for genes which are selectively or preferably expressed in the target tissues or cells.

[0190] For the purpose of expression in source tissues of the plant, such as the leaf, seed, root or stem, it is preferred that the promoters utilized in the present invention have relatively high expression in these specific tissues. For this purpose, one may choose from a number of promoters for genes with tissue- or cell-specific or -enhanced expression. Examples of such promoters reported in the literature include the chloroplast glutamine synthetase GS2 promoter from pea (Edwards et al., Proc. Natl. Acad. Sci. (U.S.A.) 87:3459-3463 (1990), herein incorporated by reference in its entirety), the chloroplast fructose-1,6-biphosphatase (FBPase) promoter from wheat (Lloyd et al., Mol. Gen. Genet. 225:209-216 (1991), herein incorporated by reference in its entirety), the nuclear photosynthetic ST-LS1 promoter from potato (Stockhaus et al., EMBO J. 8:2445-2451 (1989), herein incorporated by reference in its entirety), the phenylalanine ammonia-lyase (PAL) promoter and the chalcone synthase (CHS) promoter from Arabidopsis thaliana. Also reported to be active in photosynthetically active tissues are the ribulose-1,5-bisphosphate carboxylase (RbcS) promoter from eastern larch (Larix laricina), the promoter for the cab gene, cab6, from pine (Yamamoto et al., Plant Cell Physiol. 35:773-778 (1994), herein incorporated by reference in its entirety), the promoter for the Cab-1 gene from wheat (Fejes et al., Plant Mol. Biol. 15:921-932 (1990), herein incorporated by reference in its entirety), the promoter for the CAB-1 gene from spinach (Lubberstedt et al., Plant Physiol. 104:997-1006 (1994), herein incorporated by reference in its entirety), the promoter for the cabIR gene from rice (Luan et al., Plant Cell. 4:971-981 (1992), herein incorporated by reference in its entirety), the pyruvate, orthophosphate dikinase (PPDK) promoter from maize (Matsuoka et al., Proc. Natl. Acad. Sci. (U.S.A.) 90: 9586-9590 (1993), herein incorporated by reference in its entirety), the promoter for the tobacco Lhcb1*2 gene (Cerdan et al., Plant Mol. Biol. 33: 245-255. (1997), herein incorporated by reference in its entirety), the Arabidopsis thaliana SUC2 sucrose-H+ symporter promoter (Truernit et al., Planta. 196: 564-570 (1995), herein incorporated by reference in its entirety), and the promoter for the thylacoid membrane proteins from spinach (psad, psaF, psae, PC, FNR, atpC, atpD, cab, rbcS). Other promoters for the chlorophyl a/b-binding proteins may also be utilized in the present invention, such as the promoters for LhcB gene and PsbP gene from white mustard (Sinapis alba; Kretsch et al., Plant Mol. Biol. 28: 219-229 (1995), herein incorporated by reference in its entirety).

[0191] For the purpose of expression in sink tissues of the plant, such as the tuber of the potato plant, the fruit of tomato, or the seed of maize, wheat, rice, and barley, it is preferred that the promoters utilized in the present invention have relatively high expression in these specific tissues. A number of promoters for genes with tuber-specific or -enhanced expression are known, including the class I patatin promoter (Bevan et al., EMBO J. 8: 1899-1906 (1986); Jefferson et al., Plant Mol. Biol. 14: 995-1006 (1990), both of which are herein incorporated by reference in their entirety), the promoter for the potato tuber ADPGPP genes, both the large and small subunits, the sucrose synthase promoter (Salanoubat and Belliard, Gene. 60: 47-56 (1987), Salanoubat and Belliard, Gene. 84: 181-185 (1989), both of which are incorporated by reference in their entirety), the promoter for the major tuber proteins including the 22 kd protein complexes and proteinase inhibitors (Hannapel, Plant Physiol. 101: 703-704 (1993), herein incorporated by reference in its entirety), the promoter for the granule bound starch synthase gene (GBSS) (Visser et al., Plant Mol. Biol. 17: 691-699 (1991), herein incorporated by reference in its entirety), and other class I and II patatins promoters (Koster-Topfer et al., Mol Gen Genet. 219: 390-396 (1989); Mignery et al., Gene. 62: 27-44 (1988), both of which are herein incorporated by reference in their entirety).

[0192] Other promoters can also be used to express a fructose 1,6 bisphosphate aldolase gene in specific tissues, such as seeds or fruits. The promoter for β-conglycinin (Chen et al., Dev. Genet. 10: 112-122 (1989), herein incorporated by reference in its entirety) or other seed-specific promoters such as the napin and phaseolin promoters, can be used. The zeins are a group of storage proteins found in maize endosperm. Genomic clones for zein genes have been isolated (Pedersen et al., Cell 29: 1015-1026 (1982), herein incorporated by reference in its entirety), and the promoters from these clones, including the 15 kD, 16 kD, 19 kD, 22 kD, 27 kD, and gamma genes, could also be used. Other promoters known to function, for example, in maize, include the promoters for the following genes: waxy, Brittle, Shrunken 2, Branching enzymes I and II, starch synthases, debranching enzymes, oleosins, glutelins, and sucrose synthases. A particularly preferred promoter for maize endosperm expression is the promoter for the glutelin gene from rice, more particularly the Osgt-1 promoter (Zheng et al., Mol Cell Biol. 13: 5829-5842 (1993), herein incorporated by reference in its entirety). Examples of promoters suitable for expression in wheat include those promoters for the ADPglucose pyrophosphorylase (ADPGPP) subunits, the granule bound and other starch synthases, the branching and debranching enzymes, the embryogenesis-abundant proteins, the gliadins, and the glutenins. Examples of such promoters in rice include those promoters for the ADPGPP subunits, the granule bound and other starch synthases, the branching enzymes, the debranching enzymes, sucrose synthases, and the glutelins. A particularly preferred promoter is the promoter for rice glutelin, Osgt-1. Examples of such promoters for barley include those for the ADPGPP subunits, the granule bound and other starch synthases, the branching enzymes, the debranching enzymes, sucrose synthases, the hordeins, the embryo globulins, and the aleurone specific proteins.

[0193] Root specific promoters may also be used. An example of such a promoter is the promoter for the acid chitinase gene (Samac et al., Plant Mol. Biol. 25: 587-596 (1994), herein incorporated by reference in its entirety). Expression in root tissue could also be accomplished by utilizing the root specific subdomains of the CaMV35S promoter that have been identified (Lam et al., Proc. Natl. Acad Sci (U.S.A.) 86:7890-7894 (1989), herein incorporated by reference in its entirety). Other root cell specific promoters include those reported by Conkling et al. (Conkling et al., Plant Physiol. 93:1203-1211 (1990), herein incorporated by reference in its entirety).

[0194] Additional promoters that may be utilized are described, for example, in U.S. Pat. Nos. 5,378,619, 5,391,725, 5,428,147, 5,447,858, 5,608,144, 5,608,144, 5,614,399, 5,633,441, 5,633,435, and 4,633,436, all of which are herein incorporated in their entirety. In addition, a tissue specific enhancer may be used (Fromm et al., The Plant Cell 1:977-984 (1989), herein incorporated by reference in its entirety).

[0195] Constructs or vectors may also include, with the coding region of interest, a nucleic acid sequence that acts, in whole or in part, to terminate transcription of that region. For example, such sequences have been isolated including the Tr7 3′ sequence and the nos 3′ sequence (Ingelbrecht et al., The Plant Cell 1:671-680 (1989); Bevan et al., Nucleic Acids Res. 11:369-385 (1983), all of which are herein incorporated by reference in their entirety), or the like.

[0196] A vector or construct may also include regulatory elements. Examples of such include the Adh intron 1 (Callis et al., Genes and Develop. 1:1183-1200 (1987), herein incorporated by reference in its entirety), the sucrose synthase intron (Vasil et al., Plant Physiol. 91:1575-1579 (1989), herein incorporated by reference in its entirety) and the TMV omega element (Gallie et al., The Plant Cell 1:301-311 (1989), herein incorporated by reference in its entirety). These and other regulatory elements may be included when appropriate.

[0197] A vector or construct may also include a selectable marker. Selectable markers may also be used to select for plants or plant cells that contain the exogenous genetic material. Examples of such include, but are not limited to, a neo gene (Potrykus et al., Mol. Gen. Genet. 199:183-188 (1985), herein incorporated by reference in its entirety) which codes for kanamycin resistance and can be selected for using kanamycin, G418, etc.; a bar gene which codes for bialaphos resistance; a mutant EPSP synthase gene (Hinchee et al., Bio/Technology 6:915-922 (1988), herein incorporated by reference in its entirety) which encodes glyphosate resistance; a nitrilase gene which confers resistance to bromoxynil (Stalker et al., J. Biol. Chem. 263:6310-6314 (1988), herein incorporated by reference in its entirety); a mutant acetolactate synthase gene (ALS) which confers imidazolinone or sulphonylurea resistance (European Patent Application 154,204 (Sep. 11, 1985), herein incorporated by reference in its entirety); and a methotrexate resistant DHFR gene (Thillet et al., J. Biol. Chem. 263:12500-12508 (1988), herein incorporated by reference in its entirety).

[0198] A vector or construct may also include a transit peptide. Incorporation of a suitable chloroplast transit peptide may also be employed (European Patent Application Publication Number 0218571, herein incorporated by reference in its entirety). Translational enhancers may also be incorporated as part of the vector DNA. DNA constructs could contain one or more 5′ non-translated leader sequences which may serve to enhance expression of the gene products from the resulting mRNA transcripts. Such sequences may be derived from the promoter selected to express the gene or can be specifically modified to increase translation of the mRNA. Such regions may also be obtained from viral RNAs, from suitable eukaryotic genes, or from a synthetic gene sequence. For a review of optimizing expression of transgenes, see Koziel et al., Plant Mol. Biol. 32:393-405 (1996), herein incorporated by reference in its entirety.

[0199] A vector or construct may also include a screenable marker. Screenable markers may be used to monitor expression. Exemplary screenable markers include a β-glucuronidase or uida gene (GUS) which encodes an enzyme for which various chromogenic substrates are known (Jefferson, Plant Mol. Biol, Rep. 5: 387-405 (1987); Jefferson et al., EMBO J. 6: 3901-3907 (1987), both of which are herein incorporated by reference in their entirety); an R-locus gene, which encodes a product that regulates the production of anthocyanin pigments (red color) in plant tissues ((Dellaporta et al., Stadler Symposium 11:263-282 (1988), herein incorporated by reference in its entirety); a β-lactamase gene (Sutcliffe et al., Proc. Natl. Acad. Sci. (U.S.A.) 75: 3737-3741 (1978), herein incorporated by reference in its entirety), a gene which encodes an enzyme for which various chromogenic substrates are known (e.g., PADAC, a chromogenic cephalosporin); a luciferase gene (Ow et al., Science 234: 856-859 (1986), herein incorporated by reference in its entirety) a xylE gene (Zukowsky et al., Proc. Natl. Acad. Sci. (U.S.A.) 80:1101-1105 (1983), herein incorporated by reference in its entirety) which encodes a catechol diozygenase that can convert chromogenic catechols; an α-amylase gene (Ikatu et al., Bio/Technol. 8:241-242 (1990), herein incorporated by reference in its entirety); a tyrosinase gene (Katz et al., J. Gen. Microbiol. 129:2703-2714 (1983), herein incorporated by reference in its entirety) which encodes an enzyme capable of oxidizing tyrosine to DOPA and dopaquinone which in turn condenses to melanin; an α-galactosidase, which will turn a chromogenic α-galactose substrate.

[0200] Included within the terms “selectable or screenable marker genes” are also genes which encode a scriptable marker whose secretion can be detected as a means of identifying or selecting for transformed cells. Examples include markers which encode a secretable antigen that can be identified by antibody interaction, or even secretable enzymes which can be detected catalytically. Secretable proteins fall into a number of classes, including small, diffusible proteins detectable, e.g., by ELISA, small active enzymes detectable in extracellular solution (e.g., α-amylase, β-lactamase, phosphinothricin transferase), or proteins which are inserted or trapped in the cell wall (such as proteins which include a leader sequence such as that found in the expression unit of extension or tobacco PR—S). Other possible selectable and/or screenable marker genes will be apparent to those of skill in the art.

[0201] Methods and compositions for transforming a bacteria and other microorganisms are known in the art (see for example Sambrook et al., Molecular Cloning: A Laboratory Manual, Second Edition, Cold Spring Harbor Laboratory Press, Cold Spring Harbor, N.Y., (1989), the entirety of which is herein incorporated by reference).

[0202] There are many methods for introducing transforming nucleic acid molecules into plant cells. Suitable methods are believed to include virtually any method by which nucleic acid molecules may be introduced into a cell, such as by Agrobacterium infection or direct delivery of nucleic acid molecules such as, for example, by PEG-mediated transformation, by electroporation or by acceleration of DNA coated particles, etc. (Pottykus, Ann. Rev. Plant Physiol. Plant Mol. Biol. 42:205-225 (1991); Vasil, Plant Mol. Biol. 25: 925-937 (1994), both of which are herein incorporated by reference in their entirety). For example, electroporation has been used to tmmsform maize protoplasts (Fromm et al., Nature 312:791-793 (1986), herein incorporated by reference in its entirety).

[0203] Other vector systems suitable for introducing transforming DNA into a host plant cell includes but is not limited to binary artificial chromosome (BIBAC) vectors (Hamilton et al., Gene 200:107-116, (1997), herein incorporated by reference in its entirety, and transfection with RNA viral vectors (Della-Cioppa et al., Ann. N.Y. Acad. Sci. (1996), 792 (Engineering Plants for Commercial Products and Applications), 57-61, the entirety of which is herein incorporated by reference.

[0204] Technology for introduction of DNA into cells is well known to those of skill in the art. Four general methods for delivering a gene into cells have been described: (1) chemical methods (Graham and van der Eb, Virology, 54:536-539 (1973), the entirety of which is herein incorporated by reference); (2) physical methods such as microinjection (Capecchi, Cell 22:479-488 (1980), electroporation (Wong and Neumann, Biochem. Biophys. Res. Commun., 107:584-587 (1982); Fromm et al., Proc. Natl. Acad. Sci. USA, 82:5824-5828 (1985); U.S. Pat. No. 5,384,253; and the gene gun (Johnston and Tang, Methods Cell Biol. 43:353-365 (1994), all of which the entirety is herein incorporated by reference; (3) viral vectors (Clapp, Clin. Perinatol., 20:155-168 (1993); Lu et al., J. Exp. Med., 178:2089-2096 (1993); Eglitis and Anderson, Biotechniques, 6:608-614 (1988), all of which the entirety is herein incorporated by reference); and (4) receptor-mediated mechanisms (Curiel et al., Hum. Gen. Ther., 3:147-154 (1992); Wagner et al., Proc. Natl. Acad. Sci. USA, 89:6099-6103 (1992), all of which the entirety is herein incorporated by reference).

[0205] Acceleration methods that may be used include, for example, microprojectile bombardment and the like. One example of a method for delivering transforming nucleic acid molecules to plant cells is microprojectile bombardment. This method has been reviewed by Yang and Christou, eds., Particle Bombardment Technology for Gene Transfer, Oxford Press, Oxford, England (1994), the entirety of which is herein incorporated by reference). Non-biological particles (microprojectiles) that may be coated with nucleic acids and delivered into cells by a propelling force. Exemplary particles include those comprised of tungsten, gold, platinum, and the like.

[0206] A particular advantage of microprojectile bombardment, in addition to it being an effective means of reproducibly, and stably transforming monocotyledons, is that neither the isolation of protoplasts (Cristou et al., Plant Physiol. 87:671-674 (1988), herein incorporated by reference in its entirety) nor the susceptibility of Agrobacterium infection is required. An illustrative embodiment of a method for delivering DNA into maize cells by acceleration is a biolistics g-particle delivery system, which can be used to propel particles coated with DNA through a screen, such as a stainless steel or Nytex screen, onto a filter surface covered with corn cells cultured in suspension. Gordon-Kamm et al., describes the basic procedure for coating tungsten particles with DNA (Gordon-Kamm et al., Plant Cell 2: 603-618 (1990), herein incorporated by reference in its entirety). The screen disperses the tungsten nucleic acid particles so that they are not delivered to the recipient cells in large aggregates. A particle delivery system suitable for use with the present invention is the helium acceleration PDS-1000/He gun which is available from Bio-Rad Laboratories (Bio-Rad, Hercules, Calif.)(Sanford et al., Technique 3:3-16 (1991), herein incorporated by reference in its entirety).

[0207] For the bombardment, cells in suspension may be concentrated on filters. Filters containing the cells to be bombarded are positioned at an appropriate distance below the microprojectile stopping plate. If desired, one or more screens are also positioned between the gun and the cells to be bombarded.

[0208] Alternatively, immature embryos or other target cells may be arranged on solid culture medium. The cells to be bombarded are positioned at an appropriate distance below the macroprojectile stopping plate. If desired, one or more screens are also positioned between the acceleration device and the cells to be bombarded. Through the use of techniques set forth herein one may obtain up to 1000 or more foci of cells transiently expressing a marker gene. The number of cells in a focus which express the exogenous gene product 48 hours post-bombardment often range from one to ten and average one to three.

[0209] In bombardment transformation, one may optimize the prebombardment culturing conditions and the bombardment parameters to yield the maximum numbers of stable transformants. Both the physical and biological parameters for bombardment are important in this technology. Physical factors are those that involve manipulating the DNA/microprojectile precipitate or those that affect the flight and velocity of either the macro- or microprojectiles. Biological factors include all steps involved in manipulation of cells before and immediately after bombardment, the osmotic adjustment of target cells to help alleviate the trauma associated with bombardment, and also the nature of the transforming DNA, such as linearized DNA or intact supercoiled plasmids. It is believed that pre-bombardment manipulations are especially important for successful transformation of immature embryos. In another alternative embodiment, plastids can be stably transformed. Methods disclosed for plastid transformation in higher plants include the particle gun delivery of DNA containing a selectable marker and targeting of the DNA to the plastid genome through homologous recombination (Svab et al., Proc. Natl. Acad. Sci. (U.S.A.) 87:8526-8530 (1990); Svab and Maliga, Proc. Natl. Acad. Sci. (U.S.A.) 90:913-917 (1993); Staub and Maliga, EMBO J. 12:601-606 (1993); U.S. Pat. Nos. 5,451,513 and 5,545,818, all of which are herein incorporated by reference in their entirety).

[0210] Accordingly, it is contemplated that one may wish to adjust various aspects of the bombardment parameters in small scale studies to fully optimize the conditions. One may particularly wish to adjust physical parameters such as gap distance, flight distance, tissue distance, and helium pressure. One may also minimize the trauma reduction factors by modifying conditions which influence the physiological state of the recipient cells and which may therefore influence transformation and integration efficiencies. For example, the osmotic state, tissue hydration and the subculture stage or cell cycle of the recipient cells may be adjusted for optimum transformation. The execution of other routine adjustments will be known to those of skill in the art in light of the present disclosure.

[0211] Agrobacterium-mediated transfer is a widely applicable system for introducing genes into plant cells because the DNA can be introduced into whole plant tissues, thereby bypassing the need for regeneration of an intact plant from a protoplast. The use of Agrobacterium-mediated plant integrating vectors to introduce DNA into plant cells is well known in the art. See, for example the methods described (Fraley et al., Biotechnology 3:629-635 (1985); Rogers et al., Meth. In Enzymol, 153:253-277 (1987), both of which are herein incorporated by reference in their entirety. Further, the integration of the Ti-DNA is a relatively precise process resulting in few rearrangements. The region of DNA to be transferred is defined by the border sequences, and intervening DNA is usually inserted into the plant genome as described (Spielmann et al., Mol. Gen. Genet., 205:34 (1986), the entirety of which is herein incorporated by reference).

[0212] Modern Agrobacterium transformation vectors are capable of replication in E. coli as well as Agrobacterium, allowing for convenient manipulations as described (Klee et al., In: Plant DNA Infectious Agents, T. Hohn and J. Schell, eds., Springer-Verlag, New York, pp. 179-203 (1985), the entirety of which is herein incorporated by reference. Moreover, recent technological advances in vectors for Agrobacterium-mediated gene transfer have improved the arrangement of genes and restriction sites in the vectors to facilitate construction of vectors capable of expressing various polypeptide coding genes. The vectors described have convenient multi-linker regions flanked by a promoter and a polyadenylation site for direct expression of inserted polypeptide coding genes and are suitable for present purposes (Rogers et al., Meth. In Enzymol., 153:253-277 (1987), the entirety of which is herein incorporated by reference). In addition, Agrobacterium containing both armed and disarmed Ti genes can be used for the transformations. In those plant strains where Agrobacterium-mediated transformation is efficient, it is the method of choice because of the facile and defined nature of the gene transfer.

[0213] A transgenic plant formed using Agrobacterium transformation methods typically contains a single gene on one chromosome. Such transgenic plants can be referred to as being heterozygous for the added gene. More preferred is a transgenic plant that is homozygous for the added structural gene; i.e., a transgenic plant that contains two added genes, one gene at the same locus on each chromosome of a chromosome pair. A homozygous transgenic plant can be obtained by sexually mating (selfing) an independent segregant transgenic plant that contains a single added gene, germinating some of the seed produced and analyzing the resulting plants produced for the gene of interest.

[0214] It is also to be understood that two different transgenic plants can also be mated to produce offspring that contain two independently segregating added, exogenous genes. Selfing of appropriate progeny can produce plants that are homozygous for both added, exogenous genes that encode a polypeptide of interest. Back-crossing to a parental plant and out-crossing with a non-transgenic plant are also contemplated, as is vegetative propagation.

[0215] Transformation of plant protoplasts can be achieved using methods based on calcium phosphate precipitation, polyethylene glycol treatment, electroporation, and combinations of these treatments. See for example (Potrykus et al., Mol. Gen. Genet., 205:193-200 (1986); Lorz et al., Mol. Gen. Genet., 199:178, (1985); Fromm et al., Nature, 319:791, (1986); Uchimiya et al., Mol. Gen. Genet.:204:204, (1986); Callis et al., Genes and Development, 1183, (1987); Matcotte et al., Nature, 335:454, (1988), all of which are herein incorporated by reference in their entirety).

[0216] Application of these systems to different plant strains depends upon the ability to regenerate that particular plant strain from protoplasts. Illustrative methods for the regeneration of cereals from protoplasts are described (Fujimura et al., Plant Tissue Culture Letters, 2:74, (1985); Toriyama et al., Theor Appl. Genet. 205:34. (1986); Yamada et al., Plant Cell Rep., 4:85, (1986); Abdullah et al., Biotechnology, 4:1087, (1986), all of which are herein incorporated by reference in their entirety).

[0217] To transform plant strains that cannot be successfully regenerated from protoplasts, other ways to introduce DNA into intact cells or tissues can be utilized. For example, regeneration of cereals from immature embryos or explants can be effected as described (Vasil, Biotechnology, 6:397, (1988), herein incorporated by reference in its entirety). In addition, “particle gun” or high-velocity microprojectile technology can be utilized (Vasil et al., Bio/Technology 10:667, (1992), herein incorporated by reference in its entirety).

[0218] Using the latter technology, DNA is carried through the cell wall and into the cytoplasm on the surface of small metal particles as described (Klein et al., Nature, 328:70, (1987); Klein et al., Proc. Natl. Acad. Sci. USA, 85:8502-8505, (1988); McCabe et al., Biotechnology, 6:923, (1988), all of which are herein incorporated by reference in their entirety). The metal particles penetrate through several layers of cells and thus allow the transformation of cells within tissue explants.

[0219] Other methods of cell transformation can also be used and include but are not limited to introduction of DNA into plants by direct DNA transfer into pollen (Hess et al., Intern Rev. Cytol., 107:367, (1987); Luo et al., Plant Mol. Biol. Reporter, 6:165, (1988), all of which are herein incorporated by reference in their entirety), by direct injection of DNA into reproductive organs of a plant (Pena et al., Nature, 325:274, (1987), herein incorporated by reference in its entirety), or by direct injection of DNA into the cells of immature embryos followed by the rehydration of dessicated embryos (Neuhaus et al., Theor. Appl. Genet., 75:30, (1987), herein incorporated by reference in its entirety).

[0220] The regeneration, development, and cultivation of plants from single plant protoplast transformants or from various transformed explants is well known in the art (Weissbach and Weissbach, In: Methods for Plant Molecular Biology, (Eds.), Academic Press, Inc. San Diego, Calif., (1988), herein incorporated by reference in its entirety). This regeneration and growth process typically includes the steps of selection of transformed cells, culturing those individualized cells through the usual stages of embryonic development through the rooted plantlet stage. Transgenic embryos and seeds are similarly regenerated. The resulting transgenic rooted shoots are thereafter planted in an appropriate plant growth medium such as soil.

[0221] The development or regeneration of plants containing the foreign, exogenous gene that encodes a protein of interest is well known in the art. Preferably, the regenerated plants are self-pollinated to provide homozygous transgenic plants, as discussed before. Otherwise, pollen obtained from the regenerated plants is crossed to seed-grown plants of agronomically important lines. Conversely, pollen from plants of these important lines is used to pollinate regenerated plants. A transgenic plant of the present invention containing a desired polypeptide is cultivated using methods well known to one skilled in the art.

[0222] There are a variety of methods for the regeneration of plants from plant tissue. The particular method of regeneration will depend on the starting plant tissue and the particular plant species to be regenerated.

[0223] Methods for transforming dicots, primarily by use of Agrobacterium tumefaciens, and obtaining transgenic plants have been published for cotton (U.S. Pat. No. 5,004,863, U.S. Pat. No. 5,159,135, U.S. Pat. No. 5,518,908, all of which herein incorporated by reference in their entirety); soybean (U.S. Pat. No. 5,569,834, U.S. Pat. No. 5,416,011, McCabe et al., Biotechnology 6:923, (1988), Christou et al., Plant Physiol., 87:671-674 (1988), all of which are herein incorporated by reference in their entirety); Brassica (U.S. Pat. No. 5,463,174, herein incorporated by reference in its entirety); peanut (Cheng et al., Plant Cell Rep. 15: 653-657 (1996); McKently et al., Plant Cell Rep. 14:699-703 (1995), all of which are herein incorporated by reference in their entirety); papaya (Yang et al., (1996), herein incorporated by reference in its entirety); pea (Grant et al., Plant Cell Rep. 15:254-258, (1995), herein incorporated by reference in its entirety).

[0224] Transformation of monocotyledons using electroporation, particle bombardment, and Agrobacterium have also been reported. Transformation and plant regeneration have been achieved in asparagus (Bytebier et al., Proc. Natl. Acad. Sci. USA 84:5345, (1987), herein incorporated by reference in its entirety); barley (Wan and Lemaux, Plant Physiol 104:37, (1994), herein incorporated by reference in its entirety); maize (Rhodes et al., Science 240: 204, (1988), Gordon-Kamm et al., Plant Cell, 2:603, (1990), Frornm et al., Bio/Technology 8:833, (1990), Koziel et al., Bio/Technology 11:194, (1993), Armstrong et al., Crop Science 35:550-557, (1995), all of which are herein incorporated by reference in their entirety); oat (Somers et al., Bio/Technology, 10:1589, (1992), herein incorporated by reference in its entirety); orchardgrass (Horn et al., Plant Cell Rep. 7:469, (1988), herein incorporated by reference in its entirety); rice (Toriyama et al., Theor Appl. Genet. 205:34, (1986); Park et al., Plant Mol. Biol., 32: 1135-1148, (1996); Abedinia et al., Aust. J. Plant Physiol. 24:133-141, (1997); Zhang and Wu, Theor. Appl. Genet. 76:835, (1988); Zhang et al. Plant Cell Rep. 7:379, (1988); Battraw and Hall, Plant Sci. 86:191-202, (1992); Christou et al., Bio/Technology 9:957, (1991), all of which are herein incorporated by reference in their entirety); sugarcane (Bower and Birch, Plant J. 2:409, (1992), herein incorporated by reference in its entirety); tall fescue (Wang et al., Bio/Technology 10:691, (1992), herein incorporated by reference in its entirety), and wheat (Vasil et al., Bio/Technology 10:667, (1992); U.S. Pat. No. 5,631,152, both of which are herein incorporated by reference in their entirety).

[0225] Assays for gene expression based on the transient expression of cloned nucleic acid constructs have been developed by introducing the nucleic acid molecules into plant cells by polyethylene glycol treatment, electroporation, or particle bombardment (Marcotte, et al., Nature, 335: 454-457 (1988); Marcotte, et al., Plant Cell, 1: 523-532 (1989); McCarty, et al., Cell 66: 895-905 (1991); Hattori, et al., Genes Dev. 6: 609-618 (1992); Goff, et al., EMBO J. 9: 2517-2522 (1990), all of which are herein incorporated by reference in their entirety). Transient expression systems may be used to functionally dissect gene constructs (See generally, Mailga et al., Methods in Plant Molecular Biology, Cold Spring Harbor Press (1995)).

[0226] Any of the nucleic acid molecules of the present invention may be introduced into a plant cell in a permanent or transient manner in combination with other genetic elements such as vectors, promoters enhancers etc. Further any of the nucleic acid molecules of the present invention may be introduced into a plant cell in a manner that allows for over expression of the protein or fragment thereof encoded by the nucleic acid molecule.

[0227] Cosuppression is the reduction in expression levels, usually at the level of RNA, of a particular endogenous gene or gene family by the expression of a homologous sense construct that is capable of transcribing mRNA of the same strandedness as the transcript of the endogenous gene (Napoli et al., Plant Cell 2: 279-289 (1990); van der Krol et al., Plant Cell 2: 291-299 (1990), both of which are herein incorporated by reference in their entirety). Cosuppression may result from stable transformation with a single copy nucleic acid molecule that is homologous to a nucleic acid sequence found with the cell (Prolls and Meyer, Plant J. 2:465-475 (1992), herein incorporated by reference in its entirety) or with multiple copies of a nucleic acid molecule that is homologous to a nucleic acid sequence found with the cell (Mittlesten et al., Mol. Gen. Genet. 244: 325-330 (1994), herein incorporated by reference in its entirety). Genes, even though different, linked to homologous promoters may result in the cosuppression of the linked genes (Vaucheret, C. R. Acad. Sci. III 316: 1471-1483 (1993), herein incorporated by reference in its entirety).

[0228] This technique has, for example been applied to generate white flowers from red petunia and tomatoes that do not ripen on the vine. Up to 50% of petunia transformants that contained a sense copy of the chalcone synthase (CHS) gene produced white flowers or floral sectors; this was as a result of the post-transcriptional loss of mRNA encoding CHS (Flavell, Proc. Natl. Acad. Sci. (U.S.A.) 91:3490-3496 (1994)), herein incorporated by reference in its entirety). Cosuppression may require the coordinate transcription of the transgene and the endogenous gene, and can be reset by a developmental control mechanism (Jorgensen, Trends Biotechnol, 8:340344 (1990); Meins and Kunz, In: Gene Inactivation and Homologous Recombination in Plants (Paszkowski, J., ed.), pp. 335-348. Kluwer Academic, Netherlands (1994), both of which are herein incorporated by reference in their entirety).

[0229] It is understood that one or more of the nucleic acids of the present invention including those comprising SEQ ID NO: 1 through SEQ ID NO: 1717 or complement thereof or fragments of either or other nucleic acid molecules of the present invention may be introduced into a plant cell and transcribed using an appropriate promoter with such transcription resulting in the co-suppression of an endogenous protein.

[0230] Antisense approaches are a way of preventing or reducing gene function by targeting the genetic material (Mol et al., FEBS Lett. 268: 427-430 (1990), herein incorporated by reference in its entirety). The objective of the antisense approach is to use a sequence complementary to the target gene to block its expression and create a mutant cell line or organism in which the level of a single chosen protein is selectively reduced or abolished. Antisense techniques have several advantages over other ‘reverse genetic’ approaches. The site of inactivation and its developmental effect can be manipulated by the choice of promoter for antisense genes or by the timing of external application or microinjection. Antisense can manipulate its specificity by selecting either unique regions of the target gene or regions where it shares homology to other related genes (Hiatt et al., In Genetic Engineering, Setlow (ed.), Vol. 11, New York: Plenum 49-63 (1989), the entirety of which is herein incorporated by reference).

[0231] The principle of regulation by antisense RNA is that RNA that is complementary to the target mRNA is introduced into cells, resulting in specific RNA:RNA duplexes being formed by base pairing between the antisense substrate and the target mRNA (Green et al., Annu. Rev. Biochem. 55: 569-597 (1986), herein incorporated by reference in its entirety). Under one embodiment, the process involves the introduction and expression of an antisense gene sequence. Such a sequence is one in which part or all of the normal gene sequences are placed under a promoter in inverted orientation so that the ‘wrong’ or complementary strand is transcribed into a noncoding antisense RNA that hybridizes with the target mRNA and interferes with its expression (Takayama and Inouye, Crit. Rev. Biochem. Mol. Biol. 25: 155-184 (1990), herein incorporated by reference in its entirety). An antisense vector is constructed by standard procedures and introduced into cells by transformation, transfection, electroporation, microinjection, or by infection, etc. The type of transformation and choice of vector will determine whether expression is transient or stable. The promoter used for the antisense gene may influence the level, timing, tissue, specificity, or inducibility of the antisense inhibition.

[0232] It is understood that protein synthesis activity in a plant cell may be reduced or depressed by growing a transformed plant cell containing a nucleic acid molecule whose non-transcribed strand encodes a protein or fragment thereof.

[0233] Antibodies have been expressed in plants (Hiatt et al., Nature 342:76-78 (1989); Conrad and Fielder, Plant Mol. Biol. 26: 1023-1030 (1994), both of which are herein incorporated by reference in their entirety). Cytoplamic expression of a scFv (single-chain Fv antibodies) has been reported to delay infection by artichoke mottled crinkle virus. Transgenic plants that express antibodies directed against endogenous proteins may exhibit a physiological effect (Philips et al., EMBO J. 16: 4489-4496 (1997); Marion-Poll, Trends in Plant Science 2: 447-448 (1997), both of which are herein incorporated by reference in their entirety). For example, expressed anti-abscisic antibodies reportedly result in a general perturbation of seed development (Philips et al., EMBO J. 16: 4489-4496 (1997)).

[0234] Antibodies that are catalytic may also be expressed in plants (abzymes). The principle behind abzymes is that since antibodies may be raised against many molecules, this recognition ability can be directed toward generating antibodies that bind transition states to force a chemical reaction forward (Persidas, Nature Biotechnology 15:1313-1315 (1997); Baca et al., Ann. Rev. Biophys. Biomol. Struct. 26:461-493 (1997), both of which are herein incorporated by reference in their entirety). The catalytic abilities of abzymes may be enhanced by site directed mutagensis. Examples of abzymes are, for example, set forth in U.S. Pat. No. 5,658,753; U.S. Pat. No. 5,632,990; U.S. Pat. No. 5,631,137; U.S. Pat. No. 5,602,015; U.S. Pat. No. 5,559,538; U.S. Pat. No. 5,576,174; U.S. Pat. No. 5,500,358; U.S. Pat. No. 5,318,897; U.S. Pat. No. 5,298,409; U.S. Pat. No. 5,258,289 and U.S. Pat. No. 5,194,585, all of which are herein incorporated in their entirety.

[0235] It is understood that any of the antibodies of the present invention may be expressed in plants and that such expression can result in a physiological effect. It is also understood that any of the expressed antibodies may be catalytic.

[0236] In addition to the above discussed procedures, practitioners are familiar with the standard resource materials which describe specific conditions and procedures for the construction, manipulation and isolation of macromolecules (e.g., DNA molecules, plasmids, etc.), generation of recombinant organisms and the screening and isolating of clones, (see for example, Sambrook et al., Molecular Cloning: A Laboratory Manual, Cold Spring Harbor Press (1989); Mailga et al., Methods in Plant Molecular Biology, Cold Spring Harbor Press (1995); Birren et al., Genome Analysis: Analyzing DNA, 1, Cold Spring Harbor, N.Y., all of which are herein incorporated by reference in their entirety).

[0237] The nucleotide sequence provided in SEQ ID NO:1, through SEQ ID NO:1717 or fragment thereof, or complement thereof, or a nucleotide sequence at least 90% identical, preferably 95%, identical even more preferably 99% or 100% identical to the sequence provided in SEQ ID NO:1 through SEQ ID NO:1717 or fragment thereof, or complement thereof, can be “provided” in a variety of mediums to facilitate use fragment thereof. Such a medium can also provide a subset thereof in a form that allows a skilled artisan to examine the sequences.

[0238] In one application of this embodiment, a nucleotide sequence of the present invention can be recorded, on computer readable media. As used herein, “computer readable media” refers to any medium that can be read and accessed directly by a computer. Such media include, but are not limited to: magnetic storage media, such as floppy discs, hard disc, storage medium, and magnetic tape: optical storage media such as CD-ROM; electrical storage media such as RAM and ROM; and hybrids of these categories such as magnetic/optical storage media. A skilled artisan can readily appreciate how any of the presently known computer readable mediums can be used to create a manufacture comprising computer readable medium having recorded thereon a nucleotide sequence of the present invention.

[0239] As used herein, “recorded” refers to a process for storing information on computer readable medium. A skilled artisan can readily adopt any of the presently known methods for recording information on computer readable medium to generate media comprising the nucleotide sequence information of the present invention. A variety of data storage structures are available to a skilled artisan for creating a computer readable medium having recorded thereon a nucleotide sequence of the present invention. The choice of the data storage structure will generally be based on the means chosen to access the stored information. In addition, a variety of data processor programs and formats can be used to store the nucleotide sequence information of the present invention on computer readable medium. The sequence information can be represented in a word processing text file, formatted in commercially-available software such as WordPerfect and Microsoft Word, or represented in the form of an ASCII file, stored in a database application, such as DB2, Sybase, Oracle, or the like. A skilled artisan can readily adapt any number of data processor structuring formats (e.g. text file or database) in order to obtain computer readable medium having recorded thereon the nucleotide sequence information of the present invention.

[0240] By providing one or more of nucleotide sequences of the present invention, a skilled artisan can routinely access the sequence information for a variety of purposes. Computer software is publicly available which allows a skilled artisan to access sequence information provided in a computer readable medium. The examples which follow demonstrate how software which implements the BLAST (Altschul et al., J. Mol. Biol. 215:403-410 (1990)) and BLAZE (Brutlag et al., Comp. Chem. 17:203-207 (1993), the entirety of which is herein incorporated by reference) search algorithms on a Sybase system can be used to identify open reading frames (ORFs) within the genome that contain homology to ORFs or proteins from other organisms. Such ORFs are protein-encoding fragments within the sequences of the present invention and are useful in producing commercially important proteins such as enzymes used in amino acid biosynthesis, metabolism, transcription, translation, RNA processing, nucleic acid and a protein degradation, protein modification, and DNA replication, restriction, modification, recombination, and repair.

[0241] The present invention further provides systems, particularly computer-based systems, which contain the sequence information described herein. Such systems are designed to identify commercially important fragments of the nucleic acid molecule of the present invention. As used herein, “a computer-based system” refers to the hardware means, software means, and data storage means used to analyze the nucleotide sequence information of the present invention. The minimum hardware means of the computer-based systems of the present invention comprises a central processing unit (CPU), input means, output means, and data storage means. A skilled artisan can readily appreciate that any one of the currently available computer-based system are suitable for use in the present invention.

[0242] As indicated above, the computer-based systems of the present invention comprise a data storage means having stored therein a nucleotide sequence of the present invention and the necessary hardware means and software means for supporting and implementing a search means. As used herein, “data storage means” refers to memory that can store nucleotide sequence information of the present invention, or a memory access means which can access manufactures having recorded thereon the nucleotide sequence information of the present invention. As used herein, “search means” refers to one or more programs which are implemented on the computer-based system to compare a target sequence or target structural motif with the sequence information stored within the data storage means. Search means are used to identify fragments or regions of the sequence of the present invention that match a particular target sequence or target motif. A variety of known algorithms are disclosed publicly and a variety of commercially available software for conducting search means are available and can be used in the computer-based systems of the present invention. Examples of such software include, but are not limited to, MacPattern (EMBL), BLASTIN and BLASTIX (NCBIA). One of the available algorithms or implementing software packages for conducting homology searches can be adapted for use in the present computer-based systems.

[0243] The most preferred sequence length of a target sequence is from about 10 to 100 amino acids or from about 30 to 300 nucleotide residues. However, it is well recognized that during searches for commercially important fragments of the nucleic acid molecules of the present invention, such as sequence fragments involved in gene expression and protein processing, may be of shorter length.

[0244] As used herein, “a target structural motif,” or “target motif,” refers to any rationally selected sequence or combination of sequences in which the sequences or sequence(s) are chosen based on a three-dimensional configuration which is formed upon the folding of the target motif. There are a variety of target motifs known in the art. Protein target motifs include, but are not limited to, enzymatic active sites and signal sequences. Nucleic acid target motifs include, but are not limited to, promoter sequences, cis elements, hairpin structures and inducible expression elements (protein binding sequences).

[0245] Thus, the present invention further provides an input means for receiving a target sequence, a data storage means for storing the target sequences of the present invention sequence identified using a search means as described above, and an output means for outputting the identified homologous sequences. A variety of structural formats for the input and output means can be used to input and output information in the computer-based systems of the present invention. A preferred format for an output means ranks fragments of the sequence of the present invention by varying degrees of homology to the target sequence or target motif. Such presentation provides a skilled artisan with a ranking of sequences which contain various amounts of the target sequence or target motif and identifies the degree of homology contained in the identified fragment.

[0246] A variety of comparing means can be used to compare a target sequence or target motif with the data storage means to identify sequence fragments sequence of the present invention. For example, implementing software which implement the BLAST and BLAZE algorithms (Altschul et al., J. Mol. Biol. 215:403-410 (1990)) can be used to identify open frames within the nucleic acid molecules of the present invention. A skilled artisan can readily recognize that any one of the publicly available homology search programs can be used as the search means for the computer-based systems of the present invention. Having now generally described the invention, the same will be more readily understood through reference to the following examples which are provided by way of illustration, and are not intended to be limiting of the present invention, unless specified.

### EXAMPLE 1

[0247] The LIB3 cDNA library is generated from soybean cultivar Asgrow 3244 (Asgrow Seed Company, Des Moines, Iowa U.S.A.) hypocotyl axis tissue from seedlings 2 days after imbibition. Seeds are planted at a depth of approximately 2 cm into 2-3 inch peat pots containing Metromix 350 medium. Trays are placed in an environmental chamber and grown at 12 hr daytime/12 hr nighttime cycles. The daytime temperature is approximately 29° C. and the nighttime temperature approximately 24° C. Soil is checked and watered daily to maintain even moisture conditions. Tissue is collected 2 days after the start of imbibition. The 2 days after imbibition samples are separated into 3 collections after removal of any adhering seed coat. At 2 days after imbibition under the above conditions, the seedlings have significant expansion of the axis and are close to emerging from the soil. A few seedlings have cracked the soil surface and exhibited slight greening of the exposed cotyledons. The seedlings are washed in water to remove soil, hypocotyl axis harvested and immediately frozen in liquid nitrogen. The harvested tissue is then stored at −80° C. until RNA preparation. The RNA is purified from the stored tissue and the cDNA library is constructed as described in Example 2.

[0248] The LIB4 cDNA library is generated from soybean cultivar Asgrow 3244 (Asgrow Seed Company, Des Moines, Iowa U.S.A.) seedling cotyledon tissue harvested 2 day post-imbibition. Seeds are planted at a depth of approximately 2 cm into 2-3 inch peat pots containing Metromix 350 medium. Trays are placed in an environmental chamber and grown at 12 hr daytime/12 hr nighttime cycles. The daytime temperature is approximately 29° C. and the nighttime temperature approximately 24° C. Soil is checked and watered daily to maintain even moisture conditions. Tissue is collected 2 days after the start of imbibition. The 2 days after imbibition samples are separated into 3 collections after removal of any adhering seed coat. At 2 days after imbibition under the above conditions, the seedlings have significant expansion of the axis and are close to emerging from the soil. A few seedlings have cracked the soil surface and exhibited slight greening of the exposed cotyledons. The seedlings are washed in water to remove soil, cotyledons harvested and immediately frozen in liquid nitrogen. The harvested tissue is then stored at −80° C. until RNA preparation. The RNA is purified from the stored tissue and the cDNA library is constructed as described in Example 2.

[0249] The LIB5 cDNA library is generated from soybean cultivar Asgrow 3244 (Asgrow Seed Company, Des Moines, Iowa U.S.A.) hypocotyl axis tissue from seeds 6 hour post-imbibition. Seeds are planted at a depth of approximately 2 cm into 2-3 inch peat pots containing Metromix 350 medium. Trays are placed in an environmental chamber and grown at 12 hr daytime/12 hr nighttime cycles. The daytime temperature is approximately 29° C. and the nighttime temperature approximately 24° C. Soil is checked and watered daily to maintain even moisture conditions. Tissue is collected 6 hours after the start of imbibition. The 6 hours after imbibition sample is collected over the course of approximately 2 hours starting at 6 hours post imbibition. At the 6 hours after imbibition stage, not all cotyledons have become fully hydrated and germination, or radicle protrusion, has not occurred. The seedlings are washed in water to remove soil, hypocotyl axis harvested and immediately frozen in liquid nitrogen. The harvested tissue is then stored at −80° C. until RNA preparation. The RNA is purified from the stored tissue and the cDNA library is constructed as described in Example 2.

[0250] The LIB6 cDNA library is generated from soybean cultivar Asgrow 3244 (Asgrow Seed Company, Des Moines, Iowa U.S.A.) cotyledons from seeds 6 hour post-imbibition. Seeds are planted at a depth of approximately 2 cm into 2-3 inch peat pots containing Metromix 350 medium. Trays are placed in an environmental chamber and grown at 12 hr daytime/12 hr nighttime cycles. The daytime temperature is approximately 29° C. and the nighttime temperature approximately 24° C. Soil is checked and watered daily to maintain even moisture conditions. Tissue is collected 6 hours after imbibition. The 6 hours after imbibition sample is collected over the course of approximately 2 hours starting at 6 hours post-imbibition. At the 6 hours after imbibition, not all cotyledons have become fully hydrated and germination or radicle protrusion, have not occurred. The seedlings are washed in water to remove soil, cotyledon harvested and immediately frozen in liquid nitrogen. The harvested tissue is then stored at −80° C. until RNA preparation. The RNA is purified from the stored tissue and the cDNA library is constructed as described in Example 2.

[0251] The LIB7 cDNA library is generated from soybean cultivar Asgrow 3244 (Asgrow Seed Company, Des Moines, Iowa U.S.A.) total leaf tissue at the V4 plant development stage. Leaf tissue from 38, field grown V4 stage plants is harvested from the 4^{th} node. Leaf tissue is removed from the plants and immediately frozen in dry-ice. The harvested tissue is then stored at −80° C. until RNA preparation. The RNA is purified from the stored tissue and the cDNA library is constructed as described in Example 2.

[0252] The LIB8 cDNA library is generated from soybean cultivar Asgrow 3244 (Asgrow Seed Company, Des Moines, Iowa U.S.A.) root tissue at the V4 plant development stage. Root tissue from 76, field grown V4 stage plants is harvested. The root systems is cut from the soybean plant and washed with water to free it from the soil and immediately frozen in dry-ice. The harvested tissue is then stored at −80° C. until RNA preparation. The RNA is purified from the stored tissue and the cDNA library is constructed as described in Example 2.

### EXAMPLE 2

[0253] The stored RNA is purified using Trizol reagent from Life Technologies (Gibco BRL, Life Technologies, Gaithersburg, Md. U.S.A.), essentially as recommended by the manufacturer. Poly A+ RNA (mRNA) is purified using magnetic oligo dT beads essentially as recommended by the manufacturer (Dynabeads, Dynal Corporation, Lake Success, New York U.S.A.).

[0254] Construction of plant cDNA libraries is well-known in the art and a number of cloning strategies exist. A number of cDNA library construction kits are commercially available. The Superscript™ Plasmid System for cDNA synthesis and Plasmid Cloning (Gibco BRL, Life Technologies, Gaithersburg, Md. U.S.A.) is used, following the conditions suggested by the manufacturer. The cDNA is fractionated by chromatography prior to ligation into the pIncy vector.

### EXAMPLE 3

[0255] The cDNA libraries are plated on LB agar containing the appropriate antibiotics for selection and incubated at 37° for a sufficient time to allow the growth of individual colonies. Single colonies are individually placed in each well of a 96-well microtiter plates containing LB liquid including the selective antibiotics. The plates are incubated overnight at approximately 37° C. with gentle shaking to promote growth of the cultures. The plasmid DNA is isolated from each clone using Qiaprep plasmid isolation kits, using the conditions recommended by the manufacturer (Qiagen Inc., Santa Clara, Calif. U.S.A.).

[0256] The template plasmid DNA clones are used for subsequent sequencing. For sequencing the cDNA libraries LIB3, LIB4, LIB5, LIB6, LIB7, AND LIB8, a commercially available sequencing kit, such as the ABI PRISM dRhodamine Terminator Cycle Sequencing Ready Reaction Kit with AmpliTaq® DNA Polymerase, FS, is used under the conditions recommended by the manufacturer (PE Applied Biosystems, Foster City, Calif.). The ESTs of the present invention are generated by sequencing initiated from the 5′ end or 3′ end of a cDNA clone.

[0257] A number of sequencing techniques are known in the art, including fluorescence-based sequencing methodologies. These methods have the detection, automation and instrumentation capability necessary for the analysis of large volumes of sequence data. Currently, the 377 DNA Sequencer (Perkin-Elmer Corp., Applied Biosystems Div., Foster City, Calif.) allows the most rapid electrophoresis and data collection. With these types of automated systems, fluorescent dye-labeled sequence reaction products are detected and data entered directly into the computer, producing a chromatogram that is subsequently viewed, stored, and analyzed using the corresponding software programs. These methods are known to those of skill in the art and have been described and reviewed (Birren et al., Genome Analysis: Analyzing DNA, 1, Cold Spring Harbor, N.Y., the entirety of which is herein incorporated by reference).

The application's sequence listing, which the Patent Office published only in electronic form, follows.

SEQUENCE LISTING (1717 sequences)

SEQ ID NO: 1 - DNA, 2170 bp, Glycine max
  Clone ID: LIB3-01-B9_FLI
attcggctcgagggcagagaatcgaggaggcgcaagagtaggacgcggggaatcctgaacgccaaagactgaggcgaatatttagctgaaaataaattcacaccacaacccaacacaaacactttctctttctttctctcttcaatcttgatcccattttttttcttctctcttccttcctttggaattgaattcagcatcagcatgaacagcaggtctcaggatcaacgctcaagacctgccaagccagccacaatccatggctgcgccctctccggcgacctcgttggactccagaggctacttcgagacaacccttctcttctcaacgagagaaaccctgttatggcacagacaccacttcatgtctctgctggtcacaataggactgagatagttaaatttcttcttgattggcaagggacagataaggttgagatggaggccaagaatatgtatggagaaactccattgcacatggcagctaagaatgggtgcaatgaagccgcacaattacttcttgcttgtggtgctactgttgaagccagagcaaataacggtatgacacctttacatcttgctgtttggtactcactacgagcagaagaattcttaactgtgaaaacattgcttgagtacaatgctgattgcagtgccaaggacgatgagggaatgactcctttaaatcatctatcccaaggcccgggaactgagaaacttagggaactattactctggcatcttgaagaacaaaggaagcagcgagccattgaggcatgcagtgaaaccaaagctaaaatggatgagcttgagaaggaactatcaaatattgtcggtcttaatgatctaaaagtacaacttcgcaagtgggcaaagggcatgcttttggatgagaaacgtagatctcttggtctgcatgttggcaggagaagaccacctcatatggcctttctaggcaaccctggaacaggtaaaactatggtagcacggattcttggaaaattactccatatggtgggaattctacccactgataaagtgacagaagtacagcggactgatttagttggtgaatttgttgggcacactggtccaaaaacaaggaggaagatcaaggaagcagaggggggaattctttttgttgatgaagcctatagattgataccaatgcaaaagtccgacgataaggactatgggttggaagccttagaggagattatgtctgtcatggacagtggcaagattgtagtaatatttgctggctactgtgagccaatgaagcgagtcattgcttctaacgaaggtttctgtagacgggtgaccaagttttttcaatttaatgatttcaactcagaagaactagcgcaaatccttcacatcaagatgaataatttagctgaagatagtttgctatatggatttatgttgcatcccgattgctgtataaaagccttagcagcattgatagagagggaaacaacagaaaagcaacgtaaagagacaaatggaggtttggtagataccatgttggttaatgctagagaaaatttagacctaaggctcagctttgactgtatggatacagaagaacttcttaccatcacattggtagatttagaagcaggccttcagcaattaacacagtaatcattctttgcaatctagtagatattttggagagattcatttcagcttacctcaattttcacacaagtttgacatctgcacaatgaggaacatatcatgaataagtttggtacaataggttgattcttttgggagttcttttccttgtattttgtaattgataatattatataggcttcattcatgtactttgctatatttttttttatctgaataatgatttgtagacacctaatgcaaatctataccttgagagaaagaactagaagagagagaagtgattatttgatgagtgatatgatgtgattaagaagggagaggaagatagggagaaatgaagggtcaaatgaaatgagtgtttaggtagctatgtatcattgttgtttttatctgcctttcatttgtattcattgtatgttattattcattattgtgggggagtaacgaaatcttcttttatttgtggctgtcccaaaatattttcattattattaaccattaatgttaattggtgatgcttttt

SEQ ID NO: 2 - DNA, 206 bp, Glycine max
  Clone ID: 2DA-01-Q1-B1-A1
atcgttttgtgctgcaaggactttcaacattccggcgatgaacgccggcgttcttcgccgccgggcatcgtgggccgccggaatagtcggagcctcggtggccggcgctgcacttttgcgctcttgttcgtctaagcgctctgcgccattcgcttgcatgagcctctctactgataacaatttaaagggagctgttcaaactgaaa

SEQ ID NO: 3 - DNA, 371 bp, Glycine max
  unsure (1)..(371): unsure at all n locations
  Clone ID: 2DA-01-Q1-B1-A10
atccggtccaaggaaaaaaacaaattataggaaagggttttagattctggtttagctcaaattctaggtattatgtcaagcttatctgtgcaacaagactagtaaaggttagtttggtaggtgaagtctccaagggaaaataaagaggggaaattgttagattgggttttttcttatgacttaattaacataaaatgcaaggttaatcgttctgggtttacgaaagttgcctgcttcattgattacagacctgaagagttttcanacanaggacgagggaaaaaacaacctccatggcgggtgttttctttgaaggaattacactccgctacaaataatttcaactatgataacaagctcggcgaaagggg

SEQ ID NO: 4 - DNA, 403 bp, Glycine max
  Clone ID: 2DA-01-Q1-B1-A11
caaaacttccttaaggttggccccaaatttcacctcctcaaggatgttcccgggattgtctcaaagaacattgacaaggcactttttgaggctttcaacgcattgaacatctctgattacaactccatcttttggattgcacaccccggtgggcctgctattcttgaccaagttgagcaaaagttaggtctcaaacctgagaagatgaaggccactagagatgtgcttagtgaatatgggaacatgtcaagtgcttgtgttcttttcatcttggatgagatgaggaggaaatctgctgaaaatggacttaaaaccacaggtgaaagacttgaatggggtgttttgttcggttttggacctggactttacattgaaactgttgttctgcgcagtgtggcatctg

SEQ ID NO: 5 - DNA, 273 bp, Glycine max
  Clone ID: 2DA-01-Q1-B1-A12
tccaaaaaaaaaaaattttttttttttttaaaaaaagaggaaataaaccaaaaaagggttaccttagtatggctgtttggtgtttattgggtacccttgccttcataggaagtgagaaactaggctagttagtcccaattggaatttttttttttgtggctgaagaaggtgaaaagggggcaagtttcactcttcaaggagtttgaagggtgtcaacttgtgttttgagactctgaggttgaagctgcattttttttaagggtggggatgggt

SEQ ID NO: 6 - DNA, 264 bp, Glycine max
  Clone ID: 2DA-01-Q1-B1-A2
cgaagcgaagccccaaaagaggagagaaagaagaagaaacactcgagaaatttctcacatagggtttggatttttcgagcaatcttctctctccgccacttcacctcacgcgatctggttccgatcgcacacgttttaatgatcgtcgtcttccgcagcctctgattccgctctgatctctctcgccgcacctctccgccggaaccatgatctccgcgcagggcgagcaccaccgccaccaacaccactaccaccaccagccgc

SEQ ID NO: 7 - DNA, 425 bp, Glycine max
  Clone ID: 2DA-01-Q1-B1-A3
ctcgagccgagaatacatatctttcagctcttgttggtcatcaaaatttatgcagctttcagttcttggttttttttcatggtctaatgtatgttttactgtgccagtgtgtctatataagtgaatctgttcttgtgctggctttctactttctagtgtatatattggttagtgttccatacagcagtttgctaaccatagtgacggttagatgtggacattgtgccaatttgctatcagttaacatgggagcgtcacttcaagcatttcgccctcaagaacctcagtcacagaaacagcttctaagctttgaagaaccaagcagctgcaaggaactgggatcatcatcttcagaatgtaacaaaatagcgccattttacgatggagtagagcatgaacaacctaagattcctcccaatcgtcct

SEQ ID NO: 8 - DNA, 319 bp, Glycine max
  Clone ID: 2DA-01-Q1-B1-A4
caaagtgcttctctcctctgtctttttctctctcttgctatccttttggctagtggcactgctgcaagtgcaactccaagaagcgcagtgccaagccaccatgtttcaacattcaacagaagcctttttccttccacttttctctttggaattggttcttctgcttaccaggcagaaggagcagcaagtgtagatgggagaggaccaagcatatgggacacctacactagacagcatactgaaaagatttgggatcatagcaccggtgacatgggagctgatttttatcatcgatacaagggtgacatacaaatagcga

SEQ ID NO: 9 - DNA, 463 bp, Glycine max
  Clone ID: 2DA-01-Q1-B1-A5
caacgacatatttatattcggcatagataacaccgtactctctaatatcccatactatgaaaaacatggatatggggtggaggaatttaatgaaaccttatatgatgaatgggttaacaagggcgacgcaccggcattgccagagactcttaaaaattacaacaagctgttgtctcttggcttcaagattgtattcttgtcaggaagatatcttgacaaaatggccgtaacagaagcatacctaaagaaggctggcttccacacatgggagcagttaattctcaaggatccacatcttatcactccaaatgcactttcatacaaatcagcaatgagagagaatctgttgaggcatggatacagaattgttggaatcattggagaccaatggagcgatctgcttggagaccacataagcgatagcatgacctttaagcttcctaatcgcatgtactacattgag

SEQ ID NO: 10 - DNA, 391 bp, Glycine max
  unsure (1)..(391): unsure at all n locations
  Clone ID: 2DA-01-Q1-B1-A6
caagcctgaaatggcaactatgctgacaaaggagcatggtctgaacctcaaggagaccgagctttgcctcggtttgcctggtgggggaggcggcggcggcggcggtggtgaggtggaaactccaagggccactgggaagagagggttctctgagactgttgatctgaagcttactcttcattccaaggaagatctgaatgagagtctgaagaatgtctcaaaggagaagaccctccttaaggatcctgccaagccaccggctaaggctcaagtggttggttggccagcagtgaggtcatacaggaagaatatgatggcagtacaaaaggttagcactgaggatgtggcanagaagacatcaagcagcactgctaattctggggcatttgtc

SEQ ID NO: 11 - DNA, 459 bp, Glycine max
  unsure (1)..(459): unsure at all n locations
  Clone ID: 2DA-01-Q1-B1-A7
atcttctgagagtgtttggttgaaagtagcaaagatgtttcctttcgggcaaaagggtcaaaagataaaggggactatggtggttatgcagaagaatgtgttggatatcaacagcatcaccagtgttggagggatcgttgaccaaggcttaggcttcataggcagtgcagtcgatgcacttacttttgcagccaccaaaatctccatccagttgattagtgctaccaaggctgatggtgggaaaggaaaaattggaaagagtacaaatttaagaggaaagataacattaccaaccttgggagctggcgaacaagcatacgatgttaattttgaatgggacagtgacttcggaattcccggtgcattttatattaagaacttcatgcaaaatgagttctacctcaagtctctaattctcgaggacattccanaccacggaaccattcacttcgtatgcaa

SEQ ID NO: 12 - DNA, 362 bp, Glycine max
  unsure (1)..(362): unsure at all n locations
  Clone ID: 2DA-01-Q1-B1-A8
gcttctcttctctttgctcaacacaatctatatctatctcactcattcagacaccaacacatcctcatgtgtctaattctaccttgcttgtatttgtagcgctattactccttgctgtgtaaatggcacatgttgatgttattcgattacagtttcagccctttcggttctcctcttcctctttcttcaccccctcacctttctctgctaagatcctattctctcctctcgcctattcttcttctaggccagcgccaccagctactcttgctttcncccccagaaagcatttgctttctttcaaggtatctgcaactgttggtgaaacagggtagccaaattggtgggaaaagaatgcacca

SEQ ID NO: 13 - DNA, 389 bp, Glycine max
  Clone ID: 2DA-01-Q1-B1-A9
tacttagcctccgaaatccggctcaaggaattctgaggctgctaaagcattagcagtgcaatcagacattttggagaaggaacttggtgaaattcaacaggttttactagcaatgcaggaacaacagcgaaaacagcttgatctgattcttgcagttgggaaagctagtaagctatgggaaagcaagcaagaaaccaatgaacgacatgatacgttagaattgtctaattcagctgaggatggggtaaaacaggaggtgcaccaaatatgaagattgggttaaaataaggggaaattcctgaaatttgaaagtgacaaatcgtggtgcaatatttttgtttttttttttccgtgtacactgtataatcgattgttacacaaaatcaaaa

SEQ ID NO: 14 - DNA, 118 bp, Glycine max
  Clone ID: 2DA-01-Q1-B1-B1
gctgtctttgatgagttaaatatgttccaaggcttaatattaatatcattgttatgtgtggtaattgttaaagccagtgggaagaaacatgtacatattgaatagaacagaattgaat

SEQ ID NO: 15 - DNA, 377 bp, Glycine max
  Clone ID: 2DA-01-Q1-B1-B10
atccggtccaagcctccctaattggcatttctagaaaaggaaattgttaggcttgaagagcaggttgtgcatttcagacaggatttgtaccaggaagctgtctacatgtcatcttctatgaggaaattggaaaattcagtttcagctcctccaaacaagtcaaatccaacattagatagtcccaagttggataaattgaagtctcttacccaaacagctggtaattcaacagcaacatctgaaactaagcctaccacaacactcactgaggatagacaagggaaagagaatcaatcatgtactaattcttcaaagagcaggcagcaatcatccaatcaaatgaacaaaactccaattaaaaaacatgacagtcaatc

SEQ ID NO: 16 - DNA, 262 bp, Glycine max
  unsure (1)..(262): unsure at all n locations
  Clone ID: 2DA-01-Q1-B1-B11
ccaattgttcaaagacaaagaacaacaacaacaactgtaaccatgcttgtctaccaagatcttcttacaggtgacgagcttctctctgactcattcccgtacaaggaaactgagaatggaatgctgtgggaagtggaaggaaagtgggttgttcaaggagcagtcaatgtagatattggtgctaacccttctgcagaaggtggggatgangacgagggagttgatgatcaagctgtcaaagtagttgatattgttgacactt

SEQ ID NO: 17 - DNA, 305 bp, Glycine max
  unsure (1)..(305): unsure at all n locations
  Clone ID: 2DA-01-Q1-B1-B12
tcggtccaaattaaccttcaaacttgaacaggcaaataaagcatttgaaaaggtgtgagcctcttaaggagtctgaagtgaaggtgctctgcctcaaagccatggaaatcctcgtcgaagagagcaacgttcaaagggtcgacgctcctgtcaccatatgtggtgatattcacggtcagttttatgacatgaaggagcttttcaaagtaggaggggattgccccaaaactaactatttattcctgngggattttgttgatanagggttttactcggttgaaacgtttctgcttctgctcgctctt

SEQ ID NO: 18 - DNA, 183 bp, Glycine max
  Clone ID: 2DA-01-Q1-B1-B2
gccgcttatcaggttgaacttcacctccttaggcaaagctaccgacaaaagtgtttaagctgcaactacagataaaattttataaattaataatgtctggaccagagaaatttattaatttagagagttataatttatcgataaattaataattattaatttaaaaaaaaaacaaacaagaac

SEQ ID NO: 19 - DNA, 372 bp, Glycine max
  Clone ID: 2DA-01-Q1-B1-B3
ctccttgtcatttgacagctgaggcagagactttactttcagctactctgatacatgaggttatgcacgttcttggttttgatcctcatgcctttgctcattttagagatgaaagaaaaagacgccgtattaaggttaccgaacaagtaatggatgaaaagattgggcggacggtaacacgtgtggtgcttcctcgtgttgtcatgcattctcgacatcattatgcggcattctcaagaaattttactggcctagagttggaagatggtggaggacgtggcacatcagggtctcactgggaaaagagacttctgatgaatgagatcatgactggttctggtggatacagattcgtagtttcaaaaatgacat

SEQ ID NO: 20 - DNA, 376 bp, Glycine max
  Clone ID: 2DA-01-Q1-B1-B4
tagcattcaggaatcactccagacaaagctgccaatgctgccgaattaaacaatgatgttcctaaacaggaccccttgcatgagttgattaagacccttgttgagatttacgacaagcctgtggagtttgtgtgggatcttactaaatttgggattccaaatgtaaattcattgttgttcttaacgtatactaatgtcagtgaaataacatcaggtgaaaaatgcttgaacatagccatacttcaattttggaccatgtatatgaatgagtggagtaatggcttgggtcatcgatcggtgtatggattccttggaccctcatcctttacacattgcaaaggataaacttggccattgtgaagaatatattgaaaat

SEQ ID NO: 21 - DNA, 422 bp, Glycine max
  Clone ID: 2DA-01-Q1-B1-B5
gcattatagcacaccacacaaaaaagcaaaacagagagaacaactgttactcacacacgccatgggtaaatgaatggtttttgagcaacagcagttaaaagagaaaagggattcagcgaagatgacatcggttggtgtggcaccaacttcgggtttgagagaagccagtgggcatggagcagcagctgcggatagattgccagaggagatgaacgatatgaaaattagggatgatagagaaatggaagccacagttgttgatggcaacggaacggagacaggacatatcattgtgactaccattgggggtagaaatggtcagcccaagcagactataagctacatggcagagcgtgttgtagggcatggatcatttggagttgtcttccaggctaagtgcttggaaaccggtgaaactgtgg

SEQ ID NO: 22 - DNA, 366 bp, Glycine max
  Clone ID: 2DA-01-Q1-B1-B6
gttaaacaagtgccaggaagaatttgagaggggtgaaagagagcaagaagaagctaataaggttgatgagggtgaggtcaagctgtctaatggggaaagagaagagaaacgtaccaaggcaagaagacgtatgttgggtaatatcagattgattggagaactatataagaagaaaatgttgacagaaaggataatgcatgaatgcatcaagaagttattgggtcagtatcaggatccggatgaagaagatattgaagctttgtgcaagctgatgagtactattggggagatgattgaccatcccaaagccaaaggaacatatggatgcgtattttgaaatgatgagatcattatcaaccaacatga

SEQ ID NO: 23 - DNA, 347 bp, Glycine max
  unsure (1)..(347): unsure at all n locations
  Clone ID: 2DA-01-Q1-B1-B7
gtgttgtggttcaatctagcatagatcgatcgatcattcatctgtgaataaaaaggtgtaactgtgactgtaatgtttctgaatcgaagctgaaaatgatgacgccgttcaaacgcttacacttagttcggacactctatcgttcatctcagattggagaatcttcgtcgtatctgctcggcagctgcaagagttattcctctgctctatcaaacggttctgagggtaatttcaggagcttccattcncatttgttaaagggccaagatggttttccctttgctggtgtaaaatctttgacgcttcgatctacaatggctgctgagttgtcccatttcatgaacaat

SEQ ID NO: 24 - DNA, 395 bp, Glycine max
  unsure (1)..(395): unsure at all n locations
  Clone ID: 2DA-01-Q1-B1-B8
ctcgagccgctcgagccgctcattgcttctgtgttttccaatctgattttcagttccccagagacgaagatgtctctccggcgtggagtccctctttctctgttggtcctcttcctcctcctggtatctccggcggcgaccttggccttccgcaagaagcacaagatcccggggccgatcaaaaccatagtggtgatagtgatggagaaccgctccttcgaccacgtcctcggctggctcaaatcctcccggcccgacatcgacggtctcaccggcagcgaatccaaccctctctccgtctcctcnccctcctccgccacaatcgccgtcactgacgacgccctcttcatcgacgccgaccccggccactccttccaggccattcgcgagcaaat

SEQ ID NO: 25 - DNA, 335 bp, Glycine max
  Clone ID: 2DA-01-Q1-B1-B9
aagggcagagaatcgaggaggcgcaagagtaggacgcggggaatcctgaacgccaaagactgaggcgaatatttagctgaaaataaattcacaccacagcccaacacaaacactttctctttctttctctcttcaatcttgatcccattttttttcttctctcttccttcctttggaattgaattcagcatcagcatgaacagcaggtctcaggatcaacgctcaagacctgccaagccagccacaatccatggctgcgccctctccggcgacctcgttggactccagaggctacttcgagacaacccttctcttctcaacgagagaaaccctgt

SEQ ID NO: 26 - DNA, 324 bp, Glycine max
  Clone ID: 2DA-01-Q1-B1-C1
aaaagaggttcgttccatttcccgcttcttcttttttccctcacttttccccggcgagaaaatgagagaaatcctccacattcagggcggccagtgcggcaaccagatcggagccaagttctgggaggtgatctgcgatgagcacggcatcgaccacaccggaaagtacagcggcgactccgaactccaattggaacgcatcaatgtctactacaacgaggccagcggtggaaggtacgttccacgcgccgttctcatggatctggagcccggcacaatggactcggtcagattcgggccgttcgggcagattttccgccccga

SEQ ID NO: 27 - DNA, 302 bp, Glycine max
  unsure (1)..(302): unsure at all n locations
  Clone ID: 2DA-01-Q1-B1-C10
aagggggtgccctccttcaagggattataacggagggtttgcatccaagcttatggcaaaagacttgaatctagcggtagaatcagctaagctggccggatgtaaatacccactaacatcacaagcacaaaagatatatactgagctctgcagcgttggccatgaagccaaagacttttcatgtgcttttcatcattattactctggaatggacgaacctcatgataagtaaattaagatgttggttgtatacatganaatgttttgatcccatgcctaatatatatggcaagaacatcaat

SEQ ID NO: 28 - DNA, 422 bp, Glycine max
  Clone ID: 2DA-01-Q1-B1-C11
atccggtccaagatcaaccttctgaaagtgtttggttgaaagtagcaaagatgtttcctttcgggcaaaagggtcaaacgataaaggggactatggtggttatgcagaagaatgtgttggatatcaacagcatcaccagtgttggagggatcgttgaccaacgcttaggcttcataagcagtgcagtcgatgcacttacttttgcagccaccaaaatctccatccagttgattagtgctaccaaggctgatggtgggaaaggaaaaattgtgaagagtacatatttaagaggaaagataacattaccaaccttgggagctggcgaacaagcatacgatgttaattttgaatgggacagtgacttcggaattcccggtgcattttatattaagaacttcatgcaaaatgagttctacctcaag

SEQ ID NO: 29 - DNA, 399 bp, Glycine max
  Clone ID: 2DA-01-Q1-B1-C12
ctccaaggcaacctaaaaattgttccttataaaaaacaagggaacttgtttgcaatggcaactctgaccaattcaactaatatcttttggcaagattgtcaaataggaaggcctgaaaggcagaagctacttaaccaaaagggatgtgttgtatggattactggactcagcggatcaggaaaaagcacattggcatgctccctaagcagagaactgcactcaaggggaaagttatcttatgtccttgatggagataaccttcggcatggactaaacaaggatcttggttttaaagctgaagatcgcactgaaaatattcgcagaactggagaaatggcaaaactcttcgctgatgctggtttaatatgtgttgctagtctgatatctccttacagaaga

SEQ ID NO: 30 - DNA, 322 bp, Glycine max
  Clone ID: 2DA-01-Q1-B1-C2
gggaattgacacccccggcgtagttgcattgcttggagcacacagtgttggtcgaacccattgtgtgaagttggtgcaccgtttgtacccagagattgatccagctctgaaccctgaccacgtccctcacattctgaagaagtgccctgatgccattccagaccctaaggccgtgcagtacgtgagaaacgaccgtggcacccccatgattctagacaacaattactacagaaatataatggacaacaaagggcttgttgatagtgggatcaccaactagccaatgacaagaagaacaaacccttatgtgaagaaaatggcc

SEQ ID NO: 31 - DNA, 409 bp, Glycine max
  unsure (1)..(409): unsure at all n locations
  Clone ID: 2DA-01-Q1-B1-C3
tgaaagggtacaaggtttggaactcaaccttcatacctttcaataataatctctccccaaattaccccttaaccccttcctcctatactgcttcaaactacaccccatccttccaaaaccaaagaccaaaacttaaagctcagaatttcaaaccccacattcttctatgcgcctctctgcccagtccgcaggcaagcagtgcttccacggctcaagctgaggagcaagaggttgaaattgcaaggggttacactatgacacaattttgtgacaaaatgatagatttctttttgaatganaaaactatatcaaaagaatggaagaagtacctgatatttagagaggagtggaaaaactacagtgatagatttttaggtaggttgcaaagaagggcagacatggaaaagga

SEQ ID NO: 32 - DNA, 367 bp, Glycine max
  Clone ID: 2DA-01-Q1-B1-C4
acctatggcaaatccaattctctcctttctcttgttggccctcctctgcatcctcgccttggctcacgccgattcccatttcgaaggctttgaagccgaagacgatgacgacctcgaagactcttccatcgatcccgcctctctccgatcaccgcccctctccgaccctactcgcctcaccaccgatcccaccccccaacctcctgcttcagatctcgccaaatcgcctcacgccaccaccttcgatttctgggacgacgaagaattcgaaggcgttcccgtcgaacaccccgccccgagcctccctccgatccaaatccccgaaaaactcaacaacactcaaacccctcaaaccctcacccttcgg

SEQ ID NO: 33 - DNA, 369 bp, Glycine max
  Clone ID: 2DA-01-Q1-B1-C5
ctcgagccgttactataagactttctttgatgctggagagtttgggtttggtctctccacggtctcattggtgcccaaccgtgattgcccatcgaatgctcagttcctagatacatatgttcacgctgctgatggtactccgttactcatcaagaacgcaatctgtgtctttgaacaatatggcagcatcatgtggcgtcacaccgaaacaggcattcccaatgaatcgttcgaagaaacgagaacggaagtcaacttagtggtaagaactgttgttaccgtgggcaactacgataacatcattgattgggagtttaaaacaagtggctcaatcaaaccctcgattgctctctcgggtatattggaaat

SEQ ID NO: 34 - DNA, 396 bp, Glycine max
  Clone ID: 2DA-01-Q1-B1-C6
cacaaattctcaaatccaaatccaattccaattccaattcccaatcttctcaaaccctaattcctcatcttgaaaatgagagaaatcttgcacatccagggagggcaatgcgggaaccagatcggagcgaagttctgggaggtgatatgcgacgagcacggcatcgaccacaccggaaagtacagtggcgactctgaactccaattggaacgcatcaatgtttattacaacgaagcgagtggcggaaggtacgttccacgcgccgtcctcatggatctagagcccggcaccatggactccgtcagatccgggccctaagggcaaaatcttccgccccggacaacttcgtcttcggccagtccggcgccggaaacaactgggccaaaggtcactaca

SEQ ID NO: 35 - DNA, 424 bp, Glycine max
  Clone ID: 2DA-01-Q1-B1-C7
atttgatccacgtgccggaattgtaatatcactggcatccatttatgatttggagaagcacaaatctcgtagagtgttatacaaaggttacatttctgagctgtttgtgccataccaagacccaacagatgatttttactataagactttctttgatgctggagagtttgggtttggtctctccacggtctcattggtgcccaaccgtgattgcccatcgaatgctcagttcctagatacatatgttcacgctgctgatggtactccgttactcatcaagaacgcaatctgtgtctttgaacaatatggcagcatcatgtggcgtcacaccgaaacaggcattcccaatgaatcgttcgaagaaacgagaacggaagtcaacttagtggtaagaactgttgtaccgtgggcaactacgataaca

SEQ ID NO: 36 - DNA, 382 bp, Glycine max
  Clone ID: 2DA-01-Q1-B1-C8
ctcagctgctttgtatgtgttgcggtgctcagcctcagcctcagcctcaggcagcaccgtttatgaggttcccattttggaattcagttcatccaaagaatccaacaagtgtagtaagggtgcaagcagaagcagcagatatgaatatgaattcaatcccacacgtgctgagtgttgctgggtctgattctgggggtggtgctggaatccaagctgatcttaagacttgtgcggctcgccgtgtctactgttccactgtcattactgctgttactgctcagaacactgctggggttcaaggactcaacattctacctgaggattttgtggcaaaccatttggcaccctgtgctctctgatatgcatgtacatgtcgtcaaaa

SEQ ID NO: 37 - DNA, 192 bp, Glycine max
  Clone ID: 2DA-01-Q1-B1-C9
caacataaaaccaaaatttaaagcctctcccccaaattccatcaccataaacgtagatttcctctccccattttcacgtgattcccaatctcacacgggtctcagaccttcaaccgattcaacgcaacagagtgataaactgtggatccggtaagatgagccacagtatcttccaacagactgtgctttgtc

SEQ ID NO: 38 - DNA, 331 bp, Glycine max
  Clone ID: 2DA-01-Q1-B1-D1
ttttcttggtataaattattacacctcaaatttcgtggaatatgctccaccaaccaccactaacaagacctatttcactgatatgctagccatactttcttcgaccaggaatggtgtacccattggcacaccgactcctctgagctggctctttatctatccggagggaatttataagctcatgacatacataagggacaactacaataatccaccagtgtacattaccgaaaatggcgttgcggaatcaaagaatgactcacttgcaatcaatgaagcccgacaggatggtattcgaattagataccatgatgggcatctcaaatccctg

SEQ ID NO: 39 - DNA, 424 bp, Glycine max
  unsure (1)..(424): unsure at all n locations
  Clone ID: 2DA-01-Q1-B1-D10
ccaaggtgcttttcgctatatttggtggtgttggtattgcctgtcttccattaggacttatattttcattttttcggcgtccaaaggctgttatcacgcgctcacagtatatcaaggaagccactgaactgggtaaaaaagctagagaactaaagaaagcagctgaggcactccatcaggaagaaagaagtggttcaaagggtagaaagtttcgtaaaaatgtgaaggaagttgagaaggagttgtttcaattagaagaagatgtaaagcttcttgaagaggtgtatccacaaggggaaaaggctgagacaacatgggcactaacagttcttggttacctggcaaaatttgtttttgggaatttttanggttgattgtttcagtggcatgggtcgctcatattattatctacctattaattgat

SEQ ID NO: 40 - DNA, 388 bp, Glycine max
  Clone ID: 2DA-01-Q1-B1-D11
acagaaatccggcccaaaaaaaaaggaaattcctccgcgccgccactcctcccatctctctgctctaaacgacaccgttttagtcttctcctcaagtcatggccacactcaagagcctctgcttcagaggaactgcctttcccgtttgcccctccaatgtcaccaacaatagaaactccaggagctcatattggaggcctgcacaagcagccgtgaagcccaatttccatctcccaatgcgcagttttgagttaaaaaataggacttctccagaggacataaaggctctgagattgataactgccattaaaactccatacctacctgatggtcgatttgatcttgaagcatatgatgacttggtgaatatgcagattggacaaggggc

SEQ ID NO: 41 - DNA, 424 bp, Glycine max
  Clone ID: 2DA-01-Q1-B1-D12
tccaaggcaaaaggaaaggaaaaggtggggtaaaagggatcaaacccattggtaaatgaaatgaggtgaaatgagactggatcatagcattgtgatagttgagagtgagtgagttaatatgttatcattgttatggtgaaagtgaaaccaaacaccgaagctgttgagtgattttcattgatccagatcgtgtctgttctacgtacgatgtacagcggctccagcgacggcgaaagccatgacgcccctcagagtcagaggaaaattccgccggcatcctccatgctttgggtccgcaatcttcgccgtttcatcggatccggcgccggcctcggatccgaagccttgatggagcttgaaactaagagaattttgctcgacatttttaaggaaaagcagaagaaaaccgccgaagctgctacaa

SEQ ID NO: 42 - DNA, 367 bp, Glycine max
  Clone ID: 2DA-01-Q1-B1-D2
ggagacttggtttcgcccaaggaaaacatggccagtgggaaagaaaatgctaagaagagaaagcctcagaactccaaggttgttgcggagattgataataacaaggacaaggacaagagagtcaaagtaactggcgaggaaggagaatccaaagtaaccgagcaccataccagaaacaagaatgccaaatccaacgcaaataagaacaacagagaaacctctgcggacacttccaaaggctccgaggttcaaaatcagaaaccagactacattcatgtccgagcgcgtcgtggacaagccacggatagtcatagcttagctgaaagagtaacgagggagaagattagcgagagaatgaagtatttgc

SEQ ID NO: 43 - DNA, 338 bp, Glycine max
  Clone ID: 2DA-01-Q1-B1-D3
aatctctcctctaactccctcgccggagaaatgcctccttccatcggtgacctaatttcactcaaaaacctttccttagcctccaactcattctccggttccattcctgattctatatctgctttaccaagtttgattcacgtggatctgagctcgaaccagctcaatggaaccattcacaaattcatttcacacatgaagtctcttaagcacttgaatctcgccaacatcaacctccaccgagttgttccttttaacctaagttttattaagcgtttggaggtattcaaggttggtggaaatagtaacctttgctataaccactccgtggtgtcttc

SEQ ID NO: 44 - DNA, 335 bp, Glycine max
  unsure (1)..(335): unsure at all n locations
  Clone ID: 2DA-01-Q1-B1-D4
caatgatattccacatcctctgacgtcaacgttacctcaaaaccgttgcgtcgtctttattccgtcaaacccaacgccgcccgataaaccacctctccgttctcctctcccccaaaattcaaattccaaatacctaagattcgctaaaatcccttccccgtcgccacatcgcatgaacccttgaattccgattcggataggcatgtccggagcggccttgtcgccgccgacgaattcgaagtcgctgacgcagacggtgagcgggtcgcacaagttcgtgatcgaaggctattcgctggcgaangggatgggaatgggggagcacattgcaagcg

SEQ ID NO: 45 - DNA, 313 bp, Glycine max
  Clone ID: 2DA-01-Q1-B1-D5
accatgttgtggttaactgccatgatacctgacctaaaacctacccgtgaatcagacatgttaggctgcaactctgctacagcagtccaactagctctgttgttcttttcaatgggattaatttctattggagctggatgcgtcagaccgtgttccatagcctttggagcagatcaactgacaattaaagaaagatctaatgatgagaggctcttggatagctactttaattggtattatacctcaattgcaatatctagcatgattgcattgagtgtaattgtgtacattcaagaaaatctaggatggaaaa

SEQ ID NO: 46 - DNA, 305 bp, Glycine max
  Clone ID: 2DA-01-Q1-B1-D6
cgtagactcgaatcctaaaaaattaaaccctagctagagagagagagagagagggtttaaagcttctttctggcgcaacgcaattcatagcaaaaacagagagtgagagagggagatggggagcgacagcgaggcagagaagtcggtgcagaaagagaaggagaagaagaagatgttggccctggctcccattgctaaacctcttgctgggaagaagctttgcaagcgaaccctaaaacttgttcgtagagctgccgaacacaaatgcttgaaaagaggagtgaaggaggtcgttaaaagtataa

SEQ ID NO: 47 - DNA, 420 bp, Glycine max
  Clone ID: 2DA-01-Q1-B1-D7
cagatatgatgtttcatgaggatgaagaatttgaaagccagtgtgctaaggagatccaaagaagaaaagaagttgaagaacaattggcaagggaaaagcaagaagtacagaaaatgaagaatcagcgagatgaaatacttgaagaattgcaaatggtccaagaccaaaattcagcacttatgaaccaaatttctgagtcccagtgtacggaaacagagttggaggagaagatcatatcagctgtggacctcttgataagtttcagggaacagagagataggcttaggatagagcatgcaaatgcacttagggaagtaaaagtgctgagaagatttggggaagcaggtacttcctcgtatcgggtagaattccctgcattttcttttgtggagatcaatgaggcaactaatgatttcgatc

SEQ ID NO: 48 - DNA, 371 bp, Glycine max
  Clone ID: 2DA-01-Q1-B1-D8
ggaaaaacaagcgaaaagagaaagaaaagaagaaaaaatggtgggagaagaagtagtaccaatggacgacaaagcgaagaggatgcgagatctgctatcgagtttctactcccctgacccttccatctccaacaacacctccaaacacgcttctctcgacgacatcaattctacttccttcgatcccgatcagtacatgaacatcctggcacacaagtccaatttggaaggcctgctccaacgccacgttgaaatggcagctgaaatcaagaatctcgacaccgacttgcaaatgctggtttacgagaattacacaagttcatcagtgctacagacactataaggaggatgaaaattaccatttccgggat

SEQ ID NO: 49 - DNA, 433 bp, Glycine max
  unsure (1)..(433): unsure at all n locations
  Clone ID: 2DA-01-Q1-B1-D9
cgagctcgagccgttagaaagaaaaaaacttaaatcaaaatacttaatagcatggcgatacatttatacaaaacttctaccccaagcacacgcaatggagccgtagacagtcaagtaaaatccaatccacgaaatcatttgatctatggacagcatcgttgtggtaaaggccgtaatgccagaggaatcattaccgcagggcatagagggggaggtcataagcgtctataccgtaaaattgattttcgacggaatgaaaaanacatatatggtagaatcgtaaccatagaatatgaccctaatcgaaatgcatacatttgtctcatacactatggggatggtgagaaaaaatatattttacaccccagaagggctataattggagatacaattgtntctggtacagaagttcctataaaaatggaaatgccct

SEQ ID NO: 50 - DNA, 321 bp, Glycine max
  unsure (1)..(321): unsure at all n locations
  Clone ID: 2DA-01-Q1-B1-E1
aaagaacacaggaaaaacagagagagagaaatcttctcaaaccatcttgcaggtgtgtccttcattgtatgttctactgctgggtaatttgaagggtaaccaagagctggttcatttcccaattattcctcaaactttctaaattcatattcttcagtgttccctagtgtcatcaccaaaatcatggaatgctgaaagatgtgcttgatagttaagaattccttcactgaggctaatgagtccgtgcctccatctgagctagccttgttcaaccttgatgacattggatgtttagtccactgcncatatctattttgtgct

SEQ ID NO: 51 - DNA, 435 bp, Glycine max
  Clone ID: 2DA-01-Q1-B1-E10
tccaaaattcttctttggttcaaacgccatttttctctcttcactcttcacctctaaacaaaataaagaaacacaacactcactcccacctctaaacaggataaagaaacacaacactcactcccacctctgtccctcttcttcttcttcttcttcttttttctttctcttcccatttcagttttcacctatgtgacttgctccatctttatgcaaaccgttaaagttaaacttgctctctgactagcttctcttctctctctatttctctttagtgggtttgcttctgtcgcagagaaatcatcaggtgttcttggctaggttgccaccatgataaagcaaattcttagcaaattgccaaagaaggtgccaaaatctgactcgtcagattctgcaaggagtgattctagtaatacaactacttttgggaatgtt

SEQ ID NO: 52 - DNA, 408 bp, Glycine max
  unsure (1)..(408): unsure at all n locations
  Clone ID: 2DA-01-Q1-B1-E11
tttaatatttaggttacaaggaaattatcatgaatccaattatttctgctgcttctgttattgctgctgggttggccgtanggcttgcttctattggacctggggttggtcaaggcactgctgcagggcaagctgtacaagggattgcacgacaaccggaggcagagggaaaaatacgaggtactttattgcttagtttggcttttatggaagctttaacaatttatggactggttgtagcattagcacttttatttgctaatccttttgtttaatcctaaagaaatagaaatacatatccttttttccgtggacttgctttaacggtcctgctttttcgaattcgatttatattaatatttcactcctataatttctttacccgttcggacaagaacacaggggaag

SEQ ID NO: 53 - DNA, 301 bp, Glycine max
  unsure (1)..(301): unsure at all n locations
  Clone ID: 2DA-01-Q1-B1-E12
cgagataactagaaacagtgtgatgaaaatgaaggtccttgttttcttcgttgctacaattttggtagcatggcaatgccatgcgtacgatatgttccctctccgaatgaacactggctatggtgcccgtactccggaggtgaaatgcgcaagttggaggcttgctgtggaagcacacaacatctttggctttgagaccattcctgaagagtgcgttgaagcaacaaaggaatacatccatggcgaacaatatagatcagactccanaacagttaaccaacaagcttacttttatgccaga

SEQ ID NO: 54 - DNA, 335 bp, Glycine max
  Clone ID: 2DA-01-Q1-B1-E2
atttaagagatgagtcatcattccatatccacctaccataaatacagtagtagtgtcaccataccagcgcgaaatagtatagatcaaatgactggtgaacatggtacagcttgcttacacgatcattcaacatgcgttaaacttacatagacgtgagtggttcccacagatataagcactctgatggactgattttggatatgtcaacagatgaacttatcgccaactaaggcgtctacctcgaagcgtgcctctgaacgtgccatgtgacatctcatgtggctttaacgttaaatgtcatgtgcgtgacaacattgctatcccctgacctacgt

SEQ ID NO: 55 - DNA, 362 bp, Glycine max
  unsure (1)..(362): unsure at all n locations
  Clone ID: 2DA-01-Q1-B1-E3
gatgaggtcaacttgaccctggcaaaaactgaggcaaaattgctgcatgagaagatttcaaacaaggcttataatgatgacgacttcatcaggattttggccacaaggagcagagcacagattaatgctactttgaatcactacaaagatgcatttggacaagatatcaacaaggacctgaaggctgatccaaaggacgagttcctgtctttactaagagcaactgtgaagtgcttgatccgtcncgagaagtacttcgagaaggttgttcgcttggcgatcaacaagcgaggaaccgatgaaggagcccttacaagagtggtggccacaagggctgaggttgatttganaaacattacaga

SEQ ID NO: 56 - DNA, 400 bp, Glycine max
  Clone ID: 2DA-01-Q1-B1-E4
gcttaaggttgccaatgaagtttggaaaccatagaggctttgcttttgtagagtatgttactcagcaggaggcacaaaatgccctcaaagcactttcaagcacccatctctatgggaggcatctggtgatagagagagcgaaagaagctgagagcttggaagaactgcgggctcgaacagctgcccaatttagtgatgaacagaatggatttcaaagtgctatgaaattttccaagaataggaagcaggttgacttcttggatgaagggaagatgaagtttggaagaatggctgactagtacagctccaaagatttaaacagtattttgcgtatgtcctggaaattctgggatcacaattttgtcataggttttcaagtttatataaacatgccatgttg

SEQ ID NO: 57 - DNA, 453 bp, Glycine max
  Clone ID: 2DA-01-Q1-B1-E5
gaaagaccggaacataaggcgggcaagagagtttgtttcttctctcttcaatggaaggcggcgaacaggttctcccttcggccaccaccgtcgccgccgccggctatcccaacgtctctcctcctccgctcgctgatcctgtcggtgcttccgatctcgctgctgctgcctcggacgacgttgttgcggaacctgaaattcacgcgctgatttcagacgaagagcacgatcacgatcacgatcacgagcatgagcatgatcatgaccatgacctcgagcacgatcacgagcatgagcatgaccaccacgaggaccgcgatgatcacgccgccgtggcagctgtctccttggaagatctcaaactcaagatcattaagcaggtggagtattatttcagcgatgaaaatctgcccactgacaagtacctgtttgggtttgtcaagaggaacaagg

SEQ ID NO: 58 - DNA, 394 bp, Glycine max
  Clone ID: 2DA-01-Q1-B1-E6
gtacaaaggggtgatcaagcctctattattggtggcaccattaacttcgtgaaggagctggagcagcttctgcagtgcatgaagggccagaagaagagaacaaaggagggtagtggcttctctgactcttcacccttttctgagttcttcatgttcccccagtactcgacacgtgccacacagagcagcagcagcagcagcagcaaaggctaccctggcacgtgcgaggccaataacaacatggcacggaacccttcatcatgggccgtggcggacatagaagtgaccttggtggatggccatgccaacatgaagatactctgcaagaaacgaacagggatgcttttgaagatggttgttggtcttttaagtcttggtctcagcattctccacc

SEQ ID NO: 59 - DNA, 434 bp, Glycine max
  Clone ID: 2DA-01-Q1-B1-E7
ctcagatctatataattcagttcttcttattctccactaatagcttcttcttcggctacttgagaccttgctgcaaaggttctctcttagcttagtaacaatgggtttgaaagcactttttgtttggtgcattatatggttaggtttagcacatttgtcccttggaggaagagtgaggcactacaagtttgatgtggagtacatgatcagaaagccagattgcttggaacacgttgtgatgggaatcaacggccagtttccaggcccaactattaaggctgaagttggtgacattcttgacattgctctcaccaacaagcttttcactgagggaactgttattcactggcatggaatcagacaggttggaactccttgggctgatggaactgctgccatctcacagtgtgctataaacccaggagaggcttttc

SEQ ID NO: 60 - DNA, 345 bp, Glycine max
  Clone ID: 2DA-01-Q1-B1-E8
gttgaagaatgacttggatggtcaaggaaggatcaaggtagatgaaaaattaagagtcaagggcaaggacaacatttttgcaattggagatattacagatattccagaaatcaagcaaggttttttggcacagcagcaggctgaagtggttgtgaagaacttgaaggtgatattagagggaggaagagaatgtaggatggaaacttacaagccacattcagcaatagcaatagtttcacttgggaggaaagatgctgtggcacagttaccattcttgacaatcggtggaagaattcctggattcatcaagtctggagaattggttggttggtaaaacaagaaaac

SEQ ID NO: 61 - DNA, 399 bp, Glycine max
  unsure (1)..(399): unsure at all n locations
  Clone ID: 2DA-01-Q1-B1-E9
aagaatgactcaagcccagattcaaccagttaaacttggaacccaaggctttgaggtactattaactacattacttgctcttattttgataattgatacaattaatctcattctaggtttcaaaattgggattcggatgtatgggccttactggagcgtacaatgaccctctccaagaacaggatggcatatctgttatcaagtatgcgttcagtaagggaatcacattttttgatactgcggatgtttatggagccaatgctaatgaacttttggttggaaaggctttgaagcagctgcncagagaaaagattcagatagccacaaaatttggtaatgcttcacgaagttttcctgatatgaagataaagggtcgcctgaatatgtgcgatcatgctg

SEQ ID NO: 62 - DNA, 370 bp, Glycine max
  unsure (1)..(370): unsure at all n locations
  Clone ID: 2DA-01-Q1-B1-F1
gggacacccagatctcaattttctgcaatttcactcagaccaggaaattaaccatggctcaacctgcaagcctcacaagaataggccttgctggcctggctgtgatgggccaaaaccttgctctcaacattgctgacaaaggctttcccatttctgtctacaaccggaccgcgtccaaggttgatgagacagttgaaagagcaaaacaagaaggaaaccttcctgtgtatggctaccataaccctaaattctttgtccaatccattcaaaagccaagggtcataataatgcttgtcaaggctggtgcacctgttgaccaaaacatcangaccctctcagcacacttggaaaagggtgattgcaccattga

SEQ ID NO: 63 - DNA, 404 bp, Glycine max
  Clone ID: 2DA-01-Q1-B1-F10
cggcccaaggccaaaggacttaaggttggaatttgggaattagggttattcccgtggcgaagatgattgaggtggttttgaacgatcgattggggaagaaggtgcgcgtgaagtgcaacgacgatgataccatcggcgacctgaagaagcttgtggcggctcagactggcacaagagccgacaagatccgcatccagaagtggtacaccatctacaaggatcacatcactctcaaggattacgagatccatgacggcatgggtctcgaactctactacaactaaacacaacaaggtgtgttttatgcgtaatatactatgtgctgggaatgggataagcgctaaatgtaattctgacttgcgaaagttcccatgatttgaaataatgtacatctccaaaatgat

SEQ ID NO: 64 - DNA, 341 bp, Glycine max
  Clone ID: 2DA-01-Q1-B1-F11
tccaagctcaagccgctcaagccggctttaaaccgcccctgacccgacccagttcgcacaaatcatgttttaccattttgttctatccaacgtcgacgacaaaaacagaaacaccaacctttttatcgtttcacttgcgaactagattacgttatttcccatatttattagcttcagatctaatcgattcactcttttttttttctctttaaattatttttacttcaatttagttatcagtgtttcgcacgctctctgtttcctcgataagcatgattttttcaaggattgcacgctccgtttcgcggtcgtctcgcgctagaaatttattacacggtgat

SEQ ID NO: 65 - DNA, 415 bp, Glycine max
  Clone ID: 2DA-01-Q1-B1-F12
aagccaaaacccattcaatttcattttaaacggaaagaaatttcggaccctaaccgcgtgtgtatttaaaatcctcaaaagcggggaaaggaagattggattctgggactttgacgttgtttcaattgtggtcgtgtcggtgcccgatctcaaacgacgatgtcatctttatatagaggagaatccaggaggtacaacaataaaccaagaggacgtcataatttgacaacgcagaagaagcaggagattaaggaagcctttgagttatttgatactgatggctcaggaactattgatgccaaagagctgaatgttgccatgagggcccttggatttgagatgacagaagagcaaattaataaaatgatagaagatgtggacaaggatggaagtggagcaattgattatgatgaat

SEQ ID NO: 66 - DNA, 445 bp, Glycine max
  Clone ID: 2DA-01-Q1-B1-F2
gcctcgctctgtttctgtctctgtgtttgcggctgaggattccgaacgagcgaccttcttcgtttctcgcaaagtttaagtcatcatgggtaaggaaaagactcacatcaacattgtcgtcattggacatgtcgactctgggaagtcaactaccactggtcatttgatctacaagcttggaggtattgacaagcgtgtgattgagaggttcgagaaggatgctgctgagatgaacaagaggtcattcaagtatgcctgggtgcttgacaagctcaaggctgagcgcgaaagaggaattaccattgatattgctttgtggaagtttgaaaccaccaagtactactgcacagtcatcgatgcccccggacatcgtgactttatcaagaacatgattactggtacctcacaggctgattgtgctgtccttatcattgactccaccact

SEQ ID NO: 67 - DNA, 363 bp, Glycine max
  Clone ID: 2DA-01-Q1-B1-F3
gggaccagttagtgaaatttgagtatttggtttccattcattcactgaaagtaaaatatgagcagtgtttggataatgatggggcaaaaggtactgctattatgattgaccttcgaagacgacttgatgagcgtgctctggagaaagaagaggaagactactttaatgacagtgacgaggaggatacaacctctgcgtctatttcacataatcagaaagtgcagcaacaacaacccgcattatccaatggtgttgctgcaagctactcagagctaagtccaaggtctggtggactggttgactatgatgatgatgatgatgaagattacaggcctcccccaaagaagaagccagaagcttctg

SEQ ID NO: 68 - DNA, 465 bp, Glycine max
  Clone ID: 2DA-01-Q1-B1-F4
ggagaagaagagcacgtccaacgccaacggaaattcctgctctttgattcgtagacaaagacagacgtggtggtatttccaacgattgatagatggatcaagggaggcaggtattcacagtggaccttcttgaacgatatgctgcaaaagggcgtggagttatcacttgcatggctgctggaaatgatgtcattgtgattggaaccagcaaaggatgggtcatcaggcatgattttggggttggcaattcaaatgagattgatctctctgtgggtcgtcccggagaccagtcaatccatagggtttttgttgatcctggagggagtcactgtattgccactgtagtgggtcctggaggagctgaaactttctatactcatgccaaatggaccaagccacgaattttaagcaagctgaaaggtcttgttgtaaatgctgttgcatggaacaaacaacagataactg

SEQ ID NO: 69 - DNA, 390 bp, Glycine max
  Clone ID: 2DA-01-Q1-B1-F5
tctttgtgtcgcctggtcttggcatctccgcagcaccacccaccctggaccaggtcttcaacagagagaaagagaaggaagaacacacacacacacacacacacgttaaactaacattttttattagtaagaagacatggctcaacccagttccaacggggatctgaataataaccagcagggtcaggttcagcaacagcagcagcagtgggcggcggcgcagccgcatcagtatcagcagcaatggatggccatgcagtacccggccacagccatggccatgatgcagcagcagatgatgatgtacccgcagcattacatgccctacgctcacccccattatccgccgccgccgccgccgccgcatcctcagtcgtctcagcatcacca

SEQ ID NO: 70 - DNA, 408 bp, Glycine max
  Clone ID: 2DA-01-Q1-B1-F6
gatcgagcaatggcattagtgtcttcactttctcctgcgaccccttcttcggttcaaaccaacactttgaacccattgggttggactgatgatcagatcctggagaaggtttacattacccacgtccacaccgctgaaaggtacgatgtggaatcgcttttcaacgttactgcaaacatcatcaagcgttctactgcacttgctgacagtgttgctgttaagactggcacacccgttggtcttattgaagacaaggttcctttgtccactttcgacccaccgttcctaaaacttaagcatattgcttctcagatgatgaacacaccgcacggtgagcatcatgcacacagcacagcaatgtcgatccttgaccagctgagaacgtacacatgggatggaaaagcgata

SEQ ID NO: 71 - DNA, 416 bp, Glycine max
  Clone ID: 2DA-01-Q1-B1-F7
gtgtgagtgtgagtgtgttgttctctctgcgaaatgcgaatgtgattcgaagaagctcgatgagaatgcgagagttagggtttcaggaacgaaggtcgtggaggcggagaggcggcgacaccagccccgactccgtcatcttcactctcgaatccaacttgagcctcttctcctccgcctccgccagcgtcgaccgctgctccttcgcctccgacgcgcacgaccacgactccttagcctccgaaatctcactccatttggcagcacaggatcatgacggtgatttcgctcatagcgaaagctggagcggtcaagatccggatctggatccgaataaacgacaacaacaacgacatgcagatacagattcagatgcagcacacacgaagcatcgccgaaatcgtttctcgggaaag

SEQ ID NO: 72 - DNA, 441 bp, Glycine max
  Clone ID: 2DA-01-Q1-B1-F8
cgctctgtttctgtctctgtgtttgcggctgaggattccgaacgagcgaccttcttcgtttctcgcaaagtttaagtcatcatgggtaaggaaaagactcacatcaacattgtcgtcattggacatgtcgactctgggaagtcaactaccactggtcatttgatctacaagcttggaggtattgacaagcgtgtgattgagaggttcgagaaggaggctgctgagatgaacaagaggtcattcaagtatgcctgggtgcttgacaagctcaaggctgagcgcgaaagaggaattaccattgatattgctttgtggaagtttgaaaccaccaagtactactgcacagtcatcgatgcccccggacatcgtgactttatcaagaacatgattactggtacctcccaggctgattgtgctgtccttatcattgactccaccact

SEQ ID NO: 73 - DNA, 302 bp, Glycine max
  unsure (1)..(302): unsure at all n locations
  Clone ID: 2DA-01-Q1-B1-F9
caacaaaaatttcccaatccaaaaattttcccggaaaatctaacctttttcaatttctcattcaagacaaacaacaacaaaaaccctaaattctttcgtaattcttgccaaattcgaaggagagagaaagagaanaagaanaggaaaaaaggttaatggcatcactgggatctccgtcttctttctggtgctaccgctgcaaccgcatagttagggttccacaaaaccacgccgttctcctctgccccgattgcaactccggcttcctcgaagagctccaaacccctccccactcgcgccga

SEQ ID NO: 74 - DNA, 305 bp, Glycine max
  Clone ID: 2DA-01-Q1-B1-G1
gagcatgaaaaagagagaaatttgagaatggctaatctcattggctttaatcttgaaactaaacctgaaagcagagaaatgctatcaaggtcatcacttcttgctgaactggcatccaagggtgtgatgtcttgtgtgactcaggaagtgaaggacatttaccatcttttggaacatgagttttatccctctgatcttgcattaaaagcgctgcccttaataactaaaatctctaagttagggggtaagctttctactgcatcatctgttccagaggtgcaattagctcagtatgttccagcact

SEQ ID NO: 75 - DNA, 110 bp, Glycine max
  Clone ID: 2DA-01-Q1-B1-G10
ctccaatttcaacggctttcaatcccagggacctcttcttctttcattaacaatcctttccattccacaccaaggttccaccttttctggactattatggggttcgagtc

SEQ ID NO: 76 - DNA, 370 bp, Glycine max
  unsure (1)..(370): unsure at all n locations
  Clone ID: 2DA-01-Q1-B1-G11
actcaatcaatgaaaaagaaaattggttaacggttaacggataaaaccatgaaaaaatgaccgaaaacattaccaaaaatggatagaacataaaattccgtgaggttaaagcaaaagatttgtgttgtgtttgaataggtttaagaaagggttttgccgtggttactgtcaatggcgacngcngngttgtatcgacgccttcttccttgtccccccgccgtcgaatttgcttcttcacaaggcaagaatggaaccatggaaggcttctacaagttggtttcctatttccaaacgcaatccgagcccgccttttgcggcctcgccagcctgtccatggtcctcaatgctcctgccattgatcctggcagaa

SEQ ID NO: 77 - DNA, 368 bp, Glycine max
  Clone ID: 2DA-01-Q1-B1-G12
caagattcctccgggccggccaaagggcaagggtttggtcaaattcaacattgaaaattctgcacagaatgctattgacaagttaaatggcatgttgatcaatgataagcaggtctatgtaggccattttctgcgaaagcaagatagagagaatgctctcagtaagacaaaatttaataatgtctatgtgaaaaacttatcagagtcaaccacggatgaagagttgatgaaattttttggagaatatggtaccattactagtgctgtaataatgagggacgcagacggtaaatcaaggtgttttggctttgtcaattttgaaaacccaaatgatgctgccaaagctgttgaaggacttaatgggaaga

SEQ ID NO: 78 - DNA, 414 bp, Glycine max
  unsure (1)..(414): unsure at all n locations
  Clone ID: 2DA-01-Q1-B1-G2
tgtactttgccaactaaatattatgacatcaatagatacttagatagatagatgcctttatttatctttgttttgaactactatgattactggtactttcttctggcagttgttacttaaaacttttgttgtctttggcaaaagggaacaaagaaagacggcagtttgcctgcactgatcagttcttagagcatgaattcagcatccccgcagtttgtttcctcaagaacgatgagtgtgtacgatccgattcaccagattagtatgtggggagaaggcttcaaaagtaatggaaatttaagtgcagccatgcctctaattgatgagacagacatgaagtttgatagtcagtcagaggatgcntctcatggtatactgggagagcctaaatagtatgacaagaagctaacaaaa

SEQ ID NO: 79 - DNA, 355 bp, Glycine max
  Clone ID: 2DA-01-Q1-B1-G3
ggcgttctatatattattgaattgacaatgaggcctgctcttgctttgcttcctcttctatttgctttcttgttagctgccactacggaatcaagaaaagatccaggggaatattggaaaatgatcatgaaagatcaggaaatgccagaaggacttcaaggtcttgtttcatttcaatctgaaaataaccctaagactcaagagcagcttggtaaaggttccaaaaaccattgtgaagagtctctagttacaaatacacaagttaacagtgacttcgaacccataccaagtgttaccaaatatgatgatttggaattcaagtcaagcattatcaagaacgatgattttgaatcga

SEQ ID NO: 80 - DNA, 458 bp, Glycine max
  Clone ID: 2DA-01-Q1-B1-G4
aatgtctccaatggagtttcatagcattaccaagtttcacaatatcccacttgtgtcttcttctcttgtgattttatgtattgctaccactatactgaataaccctgcaatggccacaaagcaatattattgtgatttccctgccatctttaactttggtgcctcaaacgctgacactggtggcttggctgcttcattttttgttgctgcaccaaaatcaccaaatggagaaacctattttcatagacctgctggaaggttctctgatggtcgactcattattgatttcttagcacagagttttggactcccttatctgagtccatatcttgattcgctggggaccaacttctcacgtggcgcaagctttgcaacagcagggatcacaatcataccccaacaaagttttagattcagtcctttctcccttggagttcagtactcgcaattccaacgtt

SEQ ID NO: 81 - DNA, 390 bp, Glycine max
  Clone ID: 2DA-01-Q1-B1-G5
agaatacattccagaaagaagagattggctttcagcgtattggcttggtttcaagtcacctgaacagctttcacgtatccgaaacactggtgtgaaaccagagatcttgaaaaatgttggaaaagcaatcacaaccatccctgaaaatttcacacctcatagagcagtgaagaggatatatgaacaacgggcccaaatgattgaaactggggaagatattgactggggatttgcagaggcgcttgcttatgctaccttgcttattgaatgtaaccatgttcgattaagtggtcaggatgttgaaagaggaacttttagtcaccgccatgctgtagttcacgatcagacaacaggagagaaatattgtcccctggacaatgtgacaatgaa

SEQ ID NO: 82 - DNA, 415 bp, Glycine max
  Clone ID: 2DA-01-Q1-B1-G6
gtctcgactcacgactcaaaaaaaccaaggcatcaaatcaaaccctcaaaagttctctctctctctctctctctccttttatatcatcatgttcttgtattgctctagtctcctctgagagaccttggagatttttccaccaacgcaaggcttcaacctccgctacgaaagcatgaggctcgccggttgaagtactctgaaggataagttccaagtgatcgacgctgattccagagtgaagcgctttctttctttccaccatggtttcgctagggttttgtcctcgcttcgtttgaactctggacgttgtttaagggttaggttttttctcttatgtacttgtctctggaaccgagcactgaaggatgttgtaccacgttgtgccaaagtcgaagttgtgcgcggtgcattgcgc

SEQ ID NO: 83 - DNA, 341 bp, Glycine max
  unsure (1)..(341): unsure at all n locations
  Clone ID: 2DA-01-Q1-B1-G7
cacaaaatccccttcaaaagcaaaaacaaaaagcttcttcactcgaattgcaggaaatggcaacaatgtccgcatcttcaatgaaccttaacatgattgactctaacttcgaagtcgacaagctcacctacgaaatcttttccattttggagaacaatttccttttcggctacggccacaccgaaaatcgcaccaatttggttaattttccgctgaaagacgcgaaaccggtgaaacacgccgccggcaaggtccgcatcctctgcattgacggcgccggcgccaccgacggcatcctcgccgcgaagtcnctcgcgcacctcgaggcttgcctcggccgc

SEQ ID NO: 84 - DNA, 362 bp, Glycine max
  Clone ID: 2DA-01-Q1-B1-G8
gccttatctatctgcatgaacatattgggatggaccatcatggtatcctttggaatgaacgcagccgtaagtgtgagggtgtcaaatgaattaggagcatctcacccaagaacagcaaagttttcacttcttgttgctatgatcacttcgactctgatcggtgtcatgctctccatggtgctgatcatcttccggaaccattaccctttctttttctcaaatgattcagaagtgagagcgatggtggtggagctcacacccatgttggccctttgcattgtcatcaacaacgtgcaacccgttctctaaggggttgctgttggcgcagggtggcaggctttggttgcttatgtgaacattgc

SEQ ID NO: 85 - DNA, 398 bp, Glycine max
  Clone ID: 2DA-01-Q1-B1-G9
gaccaaggccttcaaacccaaggaacttgtcctctttcagtaccaggcctgtccattctgcaacaaggttgcagcgtttctggactattatgatattccattcaaagtggttgaggtgaatcccataaacaagaaggagatcaaatggtccgactacaagaaggtgcctatcctcaccgttgatggtgaacaaattgttgactcttcagacataattgataagttgatcaaaaggatacatccagattatgacctaaatgctgaagaagagaagaagtggcgacagtgggtggataatcacttggtgcatgtcttgtcaccgaatatatatcggaatgttcctgaagctcttgaatcatttgattacatcaacacccaaggaaatttcagtttttctg

SEQ ID NO: 86 - DNA, 289 bp, Glycine max
  Clone ID: 2DA-01-Q1-B1-H1
atctaaccaagcacacgcaatgccagtggcattgcatattgccagaatgcttcttgtggtacatcccacacacaatttgacatatctgtgagggatttttcatcagcatagacactagtactttgttcttcctcttcgccacactcacagtccctccagaagcctcctacgaatcgacgaacggtagatgcaatgttgccgttgcttagcaatgtctacgctcaattttcgcaatttcatcaacctctccgatattaagatacgcatcttcatcaggcttcgcgcaagt

SEQ ID NO: 87 - DNA, 386 bp, Glycine max
  Clone ID: 2DA-01-Q1-B1-H10
ctaacacctacaatttttctttaatattttctcgtccctgaggcagagaaaaaaagaaaaaactaccgaagaagttgatgaattaatttaatcggaattcgtaaatattttttctctttctctttccaacctcaaccccacccttaagcctctctctctctctctctctctctcgctctctctctctctattctattgcttccttttttccgctattttctggaacaaatggctggagtgacaaaggaggaagagaggggtagtcctagttggggtgcttcattttttacgcagacaacagaggatgtggctagagctgttgccactgctatgaattctcagaggccatctgtggtatattcattgaaaaatgatcatggtgggag

SEQ ID NO: 88 - DNA, 292 bp, Glycine max
  unsure (1)..(292): unsure at all n locations
  Clone ID: 2DA-01-Q1-B1-H11
acaggattccggtccaaggtttaattaccttgaatcattggaacctggttgttcaaaattgtgtcaatgctggtgcccctcaaactccaaacccaatcttcatgacttacctgataatgagaatgagaaggaggagtcttgggttggcttcaccgagttcaccttggatcaactgagaagtgccacatcgtcattttcacccgacaacatagtctcggaacacggtgagaaggctcccaatgttgtctacanaggaaggactgaagatgataggttggttgctgtgaaacgc

SEQ ID NO: 89 - DNA, 325 bp, Glycine max
  unsure (1)..(325): unsure at all n locations
  Clone ID: 2DA-01-Q1-B1-H12
tcggttctcgttcttcccttgcggctagggttttaccgcagcttcttctaaatttaaggaagatgggtaaggaaaaggttcacatcagtattgtggtcattggccatgtcgactctgggaaatccactaccactggtcacctgatttacaagcttggaggcattgacaagcgtgttattgagaggtttgagaaggaagctgctgagatgaacaagaggtctttcaagtatgcctgggtgctggacaaacttaaggctgancgtgaaagaggaatcaccattgatattgctttgtggaagtttgaaacaacaaagttatattgcac

SEQ ID NO: 90 - DNA, 335 bp, Glycine max
  Clone ID: 2DA-01-Q1-B1-H2
gttcgaagtctcaacagcgatggcccttgcagcgtcaaaatccggcacgccacccattgccaagaggagatccatatctctccagctaaccaaggatctgtcaacatcgcaggcatggatagaaggaatttcatggcatgcggctgagactagtacaacgcagataggtgtcaagcccgccacgatgctgatcatattcacggatcagtatggttacaataacgcaggttcttcagaaatggaatgtagtatctgtgaaacgcaaacgcaagtgggaccatgacagtggaaacacaaacgtagagaacatgcacccaggggttgttgtaggagca

SEQ ID NO: 91 - DNA, 410 bp, Glycine max
  unsure (1)..(410): unsure at all n locations
  Clone ID: 2DA-01-Q1-B1-H3
tgtggtaccagcagcagagcttgtatacgtcgccgcttcagcgtagcaacatgatcattcccgagaagaaccgtaaagagatctgcaaatacctcttccaagagggagtttgctttgcgaagaaggacttcaatctggcgaagcacccggagattgatgtgccgaatctgcaggtgataaagctgatgcagagcttcaaatccagagagtacgtgagggaaacatttgcgtggatgcactattactggttcctcaccaacgatggaattgagttccttaggacttacctcaaccttccatccgaaaatgtccctgccactctcaagaancaaggccaagccggccggaaaacaattcggtggccaacccggtgatcgcccaaggggccaacctcgctttgacggaaaaag

SEQ ID NO: 92 - DNA, 292 bp, Glycine max
  Clone ID: 2DA-01-Q1-B1-H4
gaccgagcaaccataccccacacccacgcatccttcttctcttgtcatttccccacactctctttccctccatgagcgccatggatttctcttccatctatggtgtctcacacaaacgcttcctcatgctcttcctgctcttcctgctcaacgcagatcgctgtcgtgctcgccacgatgctgatcatcttcagtgatcagggtcgtttcaataacgcaggttcttcagaaatggaatgtagtatctgtgaaacgcaaacggaagtgggaccttgacagtggccacaaatac

SEQ ID NO: 93 - DNA, 400 bp, Glycine max
  Clone ID: 2DA-01-Q1-B1-H5
gctgtgtgcacctgttccaccagctgctgctgataggaaagtggagatcactggccctgtggacagaaaaatggtcatcaatgctctcaactctgcagctaaagtctttatggctgatttagaagatgcactgtcaccgacctgggaaaatcttattagtggtcaagtgaacttgaaggatgctgtggatgggacaataagcttccatgacaaagtaagaaacatggtttacaagctcaatgatcagacagcaaagctttttgtgagaacaagaggttggcatctacctgaagcacatattctgattgatggtgaacctgcaactggttgccttgttgattttggcctctatttctaccacaaccactcggcattccgacgcactcaaggtgctggcttt

SEQ ID NO: 94 - DNA, 288 bp, Glycine max
  Clone ID: 2DA-01-Q1-B1-H6
gaccgagcaaccataccccacacccacgcatccttcttctcttgtcatttccccacactctctttccctccatgagcgccatggatttctcttccatctatggtgtctcacacaaacgcttcctcatgctctgcgtgctctacctgttcaacgcagatcggtgtcgtgcacgccataatgctgatcatattcagggatcagggtggtttcaataacgcaggttcttcagaagtggaatgtagtacctgtgaaacgcaaacgggagtgggaccttgacagtggccagaa

SEQ ID NO: 95 - DNA, 394 bp, Glycine max
  Clone ID: 2DA-01-Q1-B1-H7
taagaaaatagaagccttattttgctctctgttctttctctcaacaatccttccaacaaatcaagagagttgaattctgaagcttttgctagtttctaccactcaggtttgtttctccgaacgcgaaaatctaatacttcttttagggtttgtgatggatgatctgcgagaatctatgttctatccgacttcatttatctcagtgaagttttctgcgcttccacgatgcaaatatagggtttcgcgtttagggttcctttcaatttatttattatcggggttttcataaggatcggcaatatcctaatttggggtttggggagagtctctattgacgttgctgatcagggttaaattattggtctttgatccaagtcttcaatgggttttgatc

SEQ ID NO: 96 - DNA, 290 bp, Glycine max
  Clone ID: 2DA-01-Q1-B1-H8
gaccgagcaaccataccccacacccacgcatccttcttctcttgtcatttccccacactctctttccctccatgagcgccatggatttctcttccatctatggtgtctcacacaaacgcttcctcatgctctgcgtgctcttcctgttcaacgcagatcggtgtcgtgctcgccatgatgctgatcatcttcagggatcagggtggtttcaataacgcaggttcttcagaaatggaatgtagtatctgtgaaacgcaaacgcgagtgggaggttgacagtggccagaaat

SEQ ID NO: 97 - DNA, 424 bp, Glycine max
  unsure (1)..(424): unsure at all n locations
  Clone ID: 2DA-01-Q1-B1-H9
aagcttctccaatccccatttcgcaaattcacaatcgccaccattcccaaccctaaccctaaccctaaccctaaccctaacccttctcaaacaatggtagtcgccctgggccccgggaaattctacggcaccagccttccccgccctcgcatctacaccgacgtcaagttcaacgaccaccgcgtcgacccacccgttcccgtcaacgacccactcatgtcatgggccgaagaggcccactggtccatgggcggcctcagtttcaagcgcctccgcctccagggcaaaatcgaaggcaacgtcganaggctccgctcccagcgcgagaagatccaggcccgaagcgcaagcccaccggcccgctccgatcttcgcagatccaaaagagctgcctcccctctgactcaacgggtccggtcatgac

SEQ ID NO: 98 - DNA, 358 bp, Glycine max
  Clone ID: 2DA-02-Q1-B1-A1
gccctcagcaccagccgaaagcgaagaaagagctttcgatccctgtaaccgcgttcgacgatttagggtttttttcggagacaatggcggatgaatcggagcacacggcggcgccggcgagcggtgaatcgctgcttgacaagattgccgagaagattcacggccaccacgactcttcctcttcctccgattccgattcggagaaaaaggaaacttcgtcaattaaggaaaaggttttccgcctctttggaagggagaagccagttcactccgtcctcggcggtggaaaacctgctgatgtgctcttgtggaggaacaagaagatatctgctagtgtacttggtgtagccactgctgt

SEQ ID NO: 99 - DNA, 390 bp, Glycine max
  Clone ID: 2DA-02-Q1-B1-A10
gggtgctcgaagctttttctgagagatattatgatcaggctcaaaatatcctagccaataaggatgctgctcttttgttatcatactcaagtgtaatgcttaatacagatcagcacaattcacaggtcaaaaagaagatgacagaagaggattttatccgaaataataggcgaataaatggtggcaatgatctacctcgacagttcctgtcagaactttaccattcaatttgtaagaatgagatccggacaactcctaagcaaggttctggtttccctgaaatgaccccaagtcggtggatttatctcatgcacaagtcagaaaaatctgctccattcattgtctctgattccacagcataccttgattatgatatgttttctaaaatgt

SEQ ID NO: 100 - DNA, 329 bp, Glycine max
  Clone ID: 2DA-02-Q1-B1-A11
agctgctccatttttatacgaagatcagattcaggtctctatcaccaagatccaacaacttctcaaccacaacgagttgctattcccttcgagtcacgaacccagaaaattaaaacattaaaaaagatatcaagtatcaaaatctaaacggcatcagcaaacatgtctcaacaccatggtgatgaaatggagtatgcggcagatgataatgaaatggcagaggtagaagaggatatgtatttccgtggcagggcatttggtgaatcagattcggatgatgacgacgactacgaatatgaccctttgggaaaccgaatatcagataccac

SEQ ID NO: 101 - DNA, 401 bp, Glycine max
  Clone ID: 2DA-02-Q1-B1-A12
gaacaacaaacccttctccttctttctcattagtgtgagatgatgatgatgatgaagaagaaggacgcagcatactcctccattctcacacgagtcctcattgccacactactctccctaaccgtgtctgcctcttcactctccgacgccgaagcaatgtacgtcaaacaacgccagcttctctactaccgagacgagttcggcgaccgaggtgagaatgtcatcgttgacccttctcttgctttcgaaaatgaccgtctcagaaacgcttatatagccttgcttccggatcgtgcactcttccacgtcaactccaatagattctgcggcaccgtgccgcacaagttcgagaggtgtgaactggtctacgaactggatctcagttacaacagattcgcagg

SEQ ID NO: 102 - DNA, 402 bp, Glycine max
  Clone ID: 2DA-02-Q1-B1-A3
gagaaaagagaaagaatggatgtgaggaacattgctgtggtggtggaagacgtggatgctgctagaactgcactacaatgggcacttgacaagatcattcgctatggtgacataatcacactgctccatgtctaccctttatcaagatccaaaagcaaaagcaaagctcgtcttcttcgactcagaggcttccagttagcactttccttccaagacatttgcaacaacttctccaatacaaaggttgagattgttgtcacggaagagaacaaagaaggaatgaaaattgtggctgcggtgcgagagattggagcttcaatgctagtggttggacttcatgatcaaagttttctttacagcttggcaatggtccatagcaacatagctaactactttaactgt

SEQ ID NO: 103 - DNA, 402 bp, Glycine max
  Clone ID: 2DA-02-Q1-B1-A4
ggaaaaagaagggatttcaaaaaccgtgattggttggaaaccacctttttcttctacgatgagaacaagaaccttgtgagtgtgaaagtgggagattcgcttgactcgaaaaagatggggtatgtttaccaagatgttgacattccatggctccagaaaaggactaaacccaaaagaactagaaaagctaagcaggtggcgttcacacaacagtttggcggcattggtgcagcaatcgctgctgagactgggccaagttccaagtttcctctcactttattggactcaaaggtaactctacgtgttaaaaggccaaagcagttgaggagcaagaatgacaatgatgaagacgaagaagtgttggtgattgatgggatcgagtttggatgggatgatgatgtc

SEQ ID NO: 104 - DNA, 388 bp, Glycine max
  Clone ID: 2DA-02-Q1-B1-A5
ctgcaacattggcggggttagaatcaaagggggccattgcagttggaaaccatgcagatattgtagtttggcaaccagagctggagtttgagctggatgatgattatcctgttttcatcaaacattctgagctctctgcttacatgggaagaaggttatctggaaaagttttggagacttttgttagaggaaaccttgtgtttaaggatgggaagcatgctcctgcaccgtgtggtgttcaaatactagccaaatgagttagttaaatactgacaggtttctttcagatgctagttacgttgggacctaaataagagatggaagtagatgctggcatcgaccactgacctagcattctccttctcatagactagtgcattaccaaatg

SEQ ID NO: 105 - DNA, 393 bp, Glycine max
  unsure (1)..(393): unsure at all n locations
  Clone ID: 2DA-02-Q1-B1-A6
tagggttatcatttctccatttccattttctctctcacttttcaagaatcgtaagctatgggaaagtcttacccaactgtgagtgctgatgaccagagggccgttgagaaggcgaagaagaagctcagaggcttcatcgctgagaagagatgcgctcctctaatgctccgtttggcatggcactctgctggaacctttgacaagggcacgaagaccggtggacccttcggaaccatcaagcaccctgccgaactggctcacagcgctaacaacggtcttgacatcgctgttaggcttttggagccactcaaggcggagttccctattttgagctacgccgatttctaccagttggctggcgttgttgccgttgaggtcacnggtggacctgaa

SEQ ID NO: 106 - DNA, 410 bp, Glycine max
  Clone ID: 2DA-02-Q1-B1-A7
agataattagttcccctctgctgttacttcttcttcttctccatcgttttcttcaatccttcattcgtttcaatggcgctaaggtttcaggtcaattagaggcaccgcacgctccaaacggaaccatgaatctctcgttggcagctccttcgtcttttcgcgggaatctcctcgttcccctgtcgcgctgcacctcttgcttggaacttgatctccgtattcagcactccgaaggttttcgccatttgcgtcctcgttggagttcgttcaagctgattcggaatccgaggaggagagtgattgcttgtagtgttactgagccacataatggtagcgacgagaaggagaaagaagcagataaaaatggagaaacactacctttggaagattcctctgagcaaagtatccct

SEQ ID NO: 107 - DNA, 359 bp, Glycine max
  Clone ID: 2DA-02-Q1-B1-A9
cttctgcgcttcttctctggtctctggcttccttggtacgggaagaactcaatcttgtccatttccctttggtttttctttcttcgatcgcgtcaccttcctttcgaccactctcttatcaccgctcgctttcttaactagagccctctccgttgagtgacgagttcgtgaatattcgcttgagatttgactgcgaagctggttttagagggtttctccaggtgtggtttgatttacagtttctgatgctgaagaaataaaaaagcttgaaggcttttgctcttctgtgtgaaaaatgtttggaaatggtgccaaattcgcaggaataatagatctcaacaaaaataataacaactact

SEQ ID NO: 108 - DNA, 372 bp, Glycine max
  Clone ID: 2DA-02-Q1-B1-B1
gatttaccgaacccttctggttggttgcactgcgggaacagattcatcgtaatccacatgattggagcatatcaggtgatgggtcaaccaatggttcgtatatcttgaaataggtgcaagcatctcctggccaaattcagatttcattaacatggaatatcgattcattgtgggcgggttaatggaccgtttcaacttgtttatatgagtttggctgacgactttttgtaatagtggccagaattcttgcgatggcaatgccgttttttagtgacgttccttcccttcatggagcaattgggtatgggcatctagttgacattaggcccatagaactgcacattgctcaaaatagcattatgaaacgatcat

SEQ ID NO: 109 - DNA, 321 bp, Glycine max
  Clone ID: 2DA-02-Q1-B1-B10
gcgcaagttggaggcttgctgtggaagcacacaacatctttggctttgagaccattcctgaagagtgcgttgaagcaacagaggaatacatggatggggaacaatatagatcagactccaaaacagttaaccaacaagcttacttttatgccagagacctcgaagtccatcccaaggacacatttgtgttcagtatagatggcaccgtactctctaatattccatactacaaaaaacatggatatggggtggagaaatttaactcgaccttgtatgatgaatgggttaacaagggcaatgcaccggcactgcccgagactc

SEQ ID NO: 110 - DNA, 316 bp, Glycine max
  Clone ID: 2DA-02-Q1-B1-B11
ctcggtccagtgtctctttcaaagtgctgctgctgccagcattgacctgagctagagcagtaaccgtcatcaccactgccagtacggtacgatggctgtgcttcaatctttcgtttcggtccacccagattctcacttccccatacagaacctcccctacggagtgttcaagccccaatccgcttctcctcctcgtcccggcgtcgccatcggagacttcgtcctcgacctctccgaaatctcttccgctggtctcttcgacgggcctctcctcaaaaactccgattgcttcctccagcccaatctaaattagttt

SEQ ID NO: 111 - DNA, 413 bp, Glycine max
  Clone ID: 2DA-02-Q1-B1-B12
cttcctccaaactcatactattcccccatgcatcatcatcctcgtcccttaattccacacccttccgctcctccaccaccaacacccacagggtaaccggctctctcctcctccttcctccaccccaccaccgtcctccgccgcaccccttcttccaccaccaccccgcgtcgcaccttcaccgtccgcgccgcccgcggcaaattcgagcgcaagaagccccacgtgaacatcggcaccatcggccacgtctaccacggcaagaccacccttaccgccgccctgaccatggctcttgccgccctaagcaacagcgcccccaaaaaatacgaccaaattgacgccgccccggaagaacgcccccgaagcatcaccatcaacaacgccaccgtggagtacgagaccgataaacg

SEQ ID NO: 112 - DNA, 382 bp, Glycine max
  Clone ID: 2DA-02-Q1-B1-B2
cgtgtcgcagcaaaaccaagccacccactaacttgtttggtccaagacatggctctgatcctgcatgctaccaaaacaaacaagaatgcctgggagactctgattgcggcagagtacagtggcgtccaagtggaattggcccctaatttcgagatgggtgtctctaacaaaactcctgaatttctcaagatgaatcctattggaaaggttcctgttttggaaacgcccgatggtccagtctttgagagcaatgcaatcgctcgttacgttgctcgactaaagggtgacaacgctttgttctcatcttctgccattgataatgcccacattgaccagtggattgatttttcatccttggagatcgatgctaatctcatgaaat

SEQ ID NO: 113 - DNA, 376 bp, Glycine max
  Clone ID: 2DA-02-Q1-B1-B3
tggtggcagactttgctggtgaagcgaattttgtttcctagtcgttggcctttcactgtctctctctccttctcctcttatctgaatcaggggctcgcggtgagtgaggtgactcgttgttgtttgtgacccggcgattcgttcctttgactccattcgaagcaaccctttgtctttcttaagcagtttcctgtgatgggctttggatttttcttttggattccctgtgatcacctgggaactgggttgttcaaattgaattttttgtgaggtatgctgtgtttggggtttgacatggttgacgttgactctgaaagatttaaacttgagagtagaagagtggggatttggctgaaaattgcatgtgggtggttgg

SEQ ID NO: 114 - DNA, 362 bp, Glycine max
  Clone ID: 2DA-02-Q1-B1-B4
cttggagaggcctttcaagttaccaaagatagaacaactctcacaaaagacagcttccagttccactccctcctcctatattctctcctttgacaacagaaatccaccaccggttacggttgaatcagcctcaaagccaggaaccaaggttttgaatcttgagaaagttttgccttcaaagaatgaaccaagacgagtagttactcagcagaacaagaaaatggggtcatttgccggatcttctcatcacacacaagatcacatcattgctgagagaatgaggagagaaaaaaattagccagaagttgattgccctctctgcccttattccagacctcaaaaagatggacaaggtgtccgtg

SEQ ID NO: 115 - DNA, 249 bp, Glycine max
  Clone ID: 2DA-02-Q1-B1-B5
ctcataactcctgagtgtcgcctgtgattacgatttctgcacaaacaaattactaagtatatccaagtcattcaagtcagattctattaggggaacgctgacacggggtttacaaattctgcagaggatcgtcggcaatgcattgcaatctccaggtaccaatctaaatatggtgatcttagtgatcatgatgctttgccaagtgcgcgatcagggcacaatcgaaatgtgaccaggttgtagattcac

SEQ ID NO: 116 - DNA, 412 bp, Glycine max
  Clone ID: 2DA-02-Q1-B1-B6
gcgtcttcataaacgcctttcttcaccgtttccgtttcctcgttcgaattcgctttttgatcagcgaaaatgagagagtgcatctcgatggagattggtcaggctggtatccaggtcggaaatgcttgctgggagctctactgcctcgagcacggcatcgggcccgatgggcaaatgccaagtgacaagacagttggcggtggtgatgatgctttcaatactttcttcagcgagactggtgctggaaagcacgtgccacgtgcagtgtttgtagatcttgagcccactgttattgatgaagtgagaaccggaacttaccgccagcttttccacccagagcagctcatcagcggtaaagatgatgccgccaacaactttgctcgttggcattataccattgggaaagagattg

SEQ ID NO: 117 - DNA, 400 bp, Glycine max
  Clone ID: 2DA-02-Q1-B1-B7
cagaaacccacaaggacctgagacatgaattgaacggtactgaggtttacttataccagcctcaacctcaaccctcgttttctttctttcagtctgagaattccaagttctgttctgagaattcattcacaacaatcacccttctctgttttattattccttcactctctgtgaaaacaaaaccaaaaaacatgtctcagaaccagaatggcaagtgggtgcgaattgccccagaacaacaacttcgaggctcctccaatggacacgtggaagtgggaggttccaataggctctgcataaaccctcagaaagatcacaagtccgaaagctatgatgaccttcaattggagttcaaccctcttgtgttcagctctctggagcagtatttgcctcctcaaat

SEQ ID NO: 118 - DNA, 403 bp, Glycine max
  Clone ID: 2DA-02-Q1-B1-B8
gccgaaaccatggccggaaaaggagagggtcctgctatcggaatcgatctcggaaccacctactcttgcgtcggtgtgtggcaacatgagggcgttgagatcatcgccaacgaccaagggaacagaaccacgccgtcttacgtcgggttcactgacaccgagcgtctcatcggtgatgcggccaagaatcaagtcgccatgaaccccatcaacaccgtcttcgatgccaagaggttgattggtcgtagattcagtgattcctctgttcagagtgatatcaaattgtggcctttcaaggtcattcctggtgctgctgacaagccaatgatcgtggttaactacaagggtgaagagaagcaatttgccgcagaagaaatctcttccatggtgctcatcaagatgc

SEQ ID NO: 119 - DNA, 318 bp, Glycine max
  Clone ID: 2DA-02-Q1-B1-B9
aagaagccagcaacattagcagctgaagcaaaagctcaatcccttgcgttaatggtggattgtcagatttgattcgattttggaaacagcttatcgatgcctcaatccgctgtgaacagatcgagggcgtggtctgtttgatttgaactgaatttcggattgaaggatctcattttcttggagcattaaagcagaaatttctagcatcctattctgttttacccaaaaaatgtggagatttaagccattcagtcacaagaaacagactggtcttgaaggccgcactatagatgttagcaatcttaacataaatatcat

SEQ ID NO: 120 - DNA, 388 bp, Glycine max
  Clone ID: 2DA-02-Q1-B1-C1
cctattacagttttctgcgacaaacccagtgatcaagccattccaattcatcgtgaatgaacccatcattatcatagctcattgtcccagggtgaatcatcgatcaagcatcaatgaggtaactaactacgaagcttattcatgtgacgaccactgttgatgtggtatttaaagtagttgtatctttgtttgaacagtacaagctttgtatctccgtcagaaatcttggtggttttaaaccatggtctattgcaatgggttgaaatggacatttgttgagggtgaattatggtaacttggtaagtgacaattttttaatgttatctttcaagaaattcaaaagagtggggaatgttgaactaatccgccagtgaagtataatgaaaga

SEQ ID NO: 121 - DNA, 361 bp, Glycine max
  Clone ID: 2DA-02-Q1-B1-C10
gtggtgagaagaacgaatcgaaaaaagaaagatcatggcgatggcaaacttggctcgacggaagggttacgccgtcgttttgtcgtcgaggtcgtcgcgttgtctgacaaggtggagggggttcgcgtccggatctgacgaaaacgaggtcgtggtcatcggcggcggtcacggcagctacctggcggccattaaagcggcgcacctgggtctgaaaaccacgtgcatcgaaaaacgtggcactctcggcggtacctgcctcaacgtcggatgcatcccgtccaaggcacttttgcattcgtcccacatgtatcatgaggctaaacatgcatttgccaagcatggggtcaaattttcatct

SEQ ID NO: 122 - DNA, 180 bp, Glycine max
  Clone ID: 2DA-02-Q1-B1-C11
attcttctcaataaacaattaattataaatacaatcaaatttcaattgtatctctaacatctaattcaccttctacatttctacctccatgcatcactactagggatccgcgtttcaacttcaccatcaatattgattcatcttccatcacgcatttcttcttaccttttcttcttatca

SEQ ID NO: 123 - DNA, 406 bp, Glycine max
  Clone ID: 2DA-02-Q1-B1-C12
caagtcgtaacttcctttgaaacagagaaacaaactaaccaaaccccttttctttctttcttttgagtgcatggcaatttggggcttttctttggaattagggcacacgcacatgcttttggttgattgatcctcacaatcacagacagtggggaagatgtaatcccaccgagattattggttgattgattagttgattgattgataagtggtaagtgcaagggaaagtggaagtgcaagtgtttgtgtgtttgtgtaagggttttttggcatgaagggtgcgttggatcggacgaaggtggtgctccgccacttgccgccttctatttctgaggccgcccttttggcccaaattgatgccgccttccctgggcgctacaactggctctctttccgtcctggcaaa

SEQ ID NO: 124 - DNA, 368 bp, Glycine max
  Clone ID: 2DA-02-Q1-B1-C2
acgaaagtgaagcttgtgcagttgtgctgtatctgggtacagtttaagtacagaccaatcctcatattcattcaattcaatggctctctaggccttcggctctccctctcttttataccctccctcacatattccccgtcgacttttttgtcccaaggcttccttaagctcttcctcccctgaatccaaagcatcgcaaagtgtttcttctgcaacttccaccaccacttcccctaccccttcggttgagtctaggccacctgaccccgccttcaactatgcactcaccaaccctaacggcaacccaatcgtaaggattgttcgagccaccgagtcttccattgaaatggtcatttttgatttccgct

SEQ ID NO: 125 - DNA, 405 bp, Glycine max
  Clone ID: 2DA-02-Q1-B1-C3
ctaaagtgatcctttctagccatttgggacgtccaaaaggtgtaacacctaaatacagtttgaagcctcttgtgccaaggctgtctcaacttcttggaattgaggttacgatggccaatgactctattggggaggaagttgaaaagttggttacacaacttccagaaggtggtgttttgcttctagagaatgtgaggttctacaaggaggaagagaagaatgatcctgaatttgcaaagaagttggcttctctagctgatctctatgtgaatgatgcatttggcactgcccacagagctcatgcttctacagaaggagttgccaaatacttgaagccctctgttgcaggattcctaatgcagaaggagcttgattatctagttggggctgtgttcaaacccaaga

SEQ ID NO: 126 - DNA, 363 bp, Glycine max
  Clone ID: 2DA-02-Q1-B1-C4
cagacccattgacccctatcaatacctccaaatcttccgcaaccccgacggcaccttcactcgcctaaacgacaccgttccatgcaccccaccctggtccgggcccactctctccgttctcaccaaagacataaccatcaaccaacaaaacaacacctggctccgtcaattcctaccccgaacagcactatcctcaaattccaatcccatgaagctacctctcatcgttttctttcacggtatcggcttcgtacgactcagcgcggcttccacaatgttccactatttttgcgtcgaaatggctaacaccgcagaggccttcgtggcctccatttactaccgcctcgcaccggaacaccggct

SEQ ID NO: 127 - DNA, 399 bp, Glycine max
  Clone ID: 2DA-02-Q1-B1-C5
gtgccttatcgctgtggttttcatcgtcttccttctcttatatttctttttttttttgtcttcgccgcacgccgaaacaatggccggaaggggagagggtcctgctatcggaatcgatctcggaaccacctactcttgtgtcggtgtgtggcaacatgaccgagttgaaatcatcgccaacgaccaagggaacagaacgacgccgtcttacgtcggcttcactgataccgagcgtctcatcggtgatgcggctaagaaccaagtcgccatgaaccccatcaacaccgtcttcgatgccaagaggttgattggtcgtagattcagtgactcctctgttcagagtgatatcaaattgtggccttttaaggtcattgctggtgctgctgacaagccaatgat

SEQ ID NO: 128 - DNA, 405 bp, Glycine max
  Clone ID: 2DA-02-Q1-B1-C6
agcttctccttcttttgggaaaagattaacaataaaagtgtggagtactgttgatatcaaagatgtttgggatcttcaacaaggggcaagggatagaggggacagtggtgttgatgccaaagaatgtgttggacttcaacgccataacctccatcggtaaacgtggtgttattgacacagccaccggcatcttaggccaaggcgtcagcttagttggtggagtaattgatactgccacttccttcttaggccgtaatatctccatgcaattgatcagtgctactcagactgatggcagtggaaatgggaaagttggaaaagaagtctatttggaaaaacatcttccgaccttgccaacgttgggagcaaggcaagatgcgttcagtattttctttgaatgggatg

SEQ ID NO: 129 - DNA, 400 bp, Glycine max
  unsure (1)..(400): unsure at all n locations
  Clone ID: 2DA-02-Q1-B1-C7
ctcttaataccaattttctagggtttatacaattttcgatggcttcttcagatgttgagtaccgttgctttgtcggtgggctcgcttggggcactgacgaccaagctctcgagagagccttctctcagtacggcgaaatcgttgaaacgaagattatcaacgatcgtgagactggaagatccaggggttttggatttgtgaccttcgcctcggagcagtccatgaaagacgccatcgaagggatgaacggccaaaaccttgacggccgtaacatcactgttaacgaagctcagtcccgtggtggcggtggcggcggaggcngtggaggtggtggatatggtggtggtcgcggtggtggatatggtggtggtggtcgcggtggtggagggggatacaaccg

SEQ ID NO: 130 - DNA, 374 bp, Glycine max
  Clone ID: 2DA-02-Q1-B1-C8
cgagttacagccgcaccttgattcagagcagagcgaccttgaagagctatggctgtcggaaagaataagaggatttccaagggaaagaagggtggcaggaagaaagccgctgatccctttgccaagaaggactggtacgatatcaaggccccttccgtctttcaggtcaagaatgttggcaaaaccctcgtctctcgtacccagggaaccaagattgcttctgaaggactcaaacatagagtgtttgaggtctcattggctgatctccaaggagatgaagaccatgccttcaagaagattcgtttgagagctgaggatgttcaagggaaaaatgttctgacaaacttttggggaatggatttcacaactgataa

SEQ ID NO: 131 - DNA, 299 bp, Glycine max
  Clone ID: 2DA-02-Q1-B1-C9
ggattaacttaatatgacgacacgacaccattgcaatttaccattctacatttaggcaatgccagccacccaatagataatagcaataagtcgttctgcacttcaactcgcactggtatttaaacaagtctgatgggttcaagattcccatctcatcagctcagcaatggcctgtatgtatcaggtcggcctgaacagccgaaagaaagaactccaacaatgagctcagttgccatgccttacactggtggagacatcaagaaatccggagaattagggaaaatgtttgatatccccat

SEQ ID NO: 132 - DNA, 378 bp, Glycine max
  unsure (1)..(378): unsure at all n locations
  Clone ID: 2DA-02-Q1-B1-D1
aacgaagtaacgaaccaaccaatcaccctgtctttctgacccaaaaacatagtcccaaatcgaacaaaatcaatcaactaactcctccaacgttgttgttattatgcagacaacaagttccaacacctccggcgccacctcgatccgttccggcatggagctcttccaccgcgcgaaggcggtgcgcctccgcagccaccacgacaagtacctcctggccgacgaggacgaggagtccgtcacgcaagaccgcaacggatcctcccgcaacgccaagtggacggtggagctcatcncggagttcgacaacatcatcagactcaagagctgttacggaaaatacttgacggcgtccaaccagccgttactgctcggcgt

SEQ ID NO: 133 - DNA, 357 bp, Glycine max
  unsure (1)..(357): unsure at all n locations
  Clone ID: 2DA-02-Q1-B1-D10
ggaaacgctatctatggctttttacggaggcgcgaaacgcgtttgtgtatccataaggcactattgttcgaattcagcgtcagagaaggtggatctgataaagcagctgagagagagaacaagcgcagctatgaaggacgtgaaagcggctctggtggattcgaattgggacatagaggaagctcagaaggaactgaggaaaagaggcaaagttttggcgtccaagaaatcctctcgaactgcctcncaaggcctcctcgctctcgcccaatcccccaccanactcgctctcatcgagctcaactgcgagaccgacttcgttgcccgaaacgacatctttcagcacctcgctttgcg

SEQ ID NO: 134 - DNA, 294 bp, Glycine max
  Clone ID: 2DA-02-Q1-B1-D11
gtgctgttcagagttgtgatgcttcactgttgctggactccacaagaaggagcttgtctgagaaggaaacagatagaagctttgggttgagaaatttgaggtacattgagaccatcaaagaagctttggaaagagaatgccctggagttgtttcatgtgctgatatcctcgttctctctgccagagatggcattgtttcgctaggaggtccccatatccctcttaagactggaagaagggatggtagaaggagcagagctgatgtggttgagcaattcctcccaaaacacaatg

SEQ ID NO: 135 - DNA, 358 bp, Glycine max
  Clone ID: 2DA-02-Q1-B1-D12
agaaaatggcaagaatatcaaattggtctcttgtcttcctcctcatctctacactactccacatagagcccagcctctcaagcccaagcccaggcccaggcccaagcccgttcataaaatcctcctgcagcagcacccagtacccagccctctgcgtctcatccctctccgtctacgcctccagcatccaacaggaccctcaccaactggttcagacagcactctccctctccctgaaccgcacccaagccaccaaaaccttcgtggctaactggaacaaattcagagggctgaaacccagagagcacgctggactcaaggactgggccgaagaaatcagcgacagcgttgaacggct

SEQ ID NO: 136 - DNA, 373 bp, Glycine max
  Clone ID: 2DA-02-Q1-B1-D2
ctctctttgttctttctcggttcagtgtctctctttgacggtggtgctgtcagcattgacctcagcttgagcagtaaaacatcatcagcactactacggtaccatggctgtgctgcaatctttcgtttcggtccacccagattctcacttccccatacagaacctcccttacggagtcttcaagccccaatccgcttcgcctcctcgtcccggcgtcgccatcggcgacttcgtcctcgacctctccgaaatatcttccgctggtctcttcgacggtcctctcctcaaaaactccgatgcttttctccagcctaatctaaataagtttgtatcactttggaagacagcctggaaggaagctcgtgctactctt

SEQ ID NO: 137 - DNA, 87 bp, Glycine max
  Clone ID: 2DA-02-Q1-B1-D3
gttcgaagaaacgagaacggaagtcatcaattcttaccactaagttgacttcagttctcgctactccgacctacacattgcactacc

SEQ ID NO: 138 - DNA, 385 bp, Glycine max
  Clone ID: 2DA-02-Q1-B1-D4
ctccgaattagttatcttgagaaacattattcccattgctatatattatggctagcatgaaggttacatgggtggttgtgatcatgtgcagggccgtggtgggtgcaccgatgatggcgcaagccatgacatgcaatgatgtgacggtgaacatggcacagtgcctatcctacctgatgcagggaggaacaccttcaacactttgctgcagcggagtcaagaacattcttggctctgctgtcaccaccgttgacaaacaaactgtgtgcaactgtctcaaggcggatgctgctaggtacaacatcaatgaccagtatgctcaagcactccctggtttctgcaaggtcaatgtcccttacaagatcagccgctccactaactgtgc

SEQ ID NO: 139 - DNA, 393 bp, Glycine max
  Clone ID: 2DA-02-Q1-B1-D5
gccgcagcagcctcaggaggagaataaggatgtctcacaggaagttcgagcacccaaggcacgggtcactgggatttctccccaggaagcgtgctgctcgtcacaggggaaaagtgaaggcattccccaaggatgacccatccaaggcacccaagctcactgcattcttgggttacaaggctggtatgactcacattgttagagaggtcgagaagccaggatcaaagcttcacaagaaggaaacatgtgagcctgttacaattattgagacccctccaatggttattgttggtgttgtgggttatgtgaaaactccccgtggtctccgaacattgaacactgtatgggctcagcacttgagtgaggaactgaaacgtaggttttataagaact

SEQ ID NO: 140 - DNA, 420 bp, Glycine max
  Clone ID: 2DA-02-Q1-B1-D6
ctcggaatccggctcaatctcgatccgggcgttctatataatattgaattgacaatgatgcctgctcttgctttgcttcctcttctatttgctttcatgtaatctgcggggtactggaatcaatgagaagatccaagggaatattggaaaatgatcatgaaagatcaggaaatgccagaaggacttcaaggtcttgtttcatttcaatctgaaaataaccctaagactcaagagcatcttggtaaatgttccaaaaaccattgtgaagagtctctagttacaaatacacaagttaacagtgacttcgaacccataccaagtgttaccaaatatgatgatttgggattcaagtcaagcattatcaagaactatgattttgaatctagaccaagtgttactaagtatgatgattttgaactc

SEQ ID NO: 141 - DNA, 395 bp, Glycine max
  Clone ID: 2DA-02-Q1-B1-D7
ggaaaggcaaaagggaaagatggtgtgcataaggaaggcgacggtgaaggaccttctggcgatgcaggcgtgcaacctgttctgcctccctgagaactaccagatgaagtactacctctatcacatcctctcctggccccagctcctctacgtcgccgaagactacaacggccgcatcgtcggctacgtcctcgccaagatggaggaagagaccactgactgccacggccacatcacctccctcgccgtcctccgcacccaccgcaagctaggcctcgccactaagctcatgaccgccgcccagaacgccatggaacaggtgtttggtgccgagtacgtgtccctgcacgtgcgcaagagcaaccgcgcggccttcaatttgtacacggagactc

SEQ ID NO: 142 - DNA, 398 bp, Glycine max
  Clone ID: 2DA-02-Q1-B1-D8
ctctttctctcttcaacattctctctcaccaaagcaacaacacacacactgagagcgaggggaattcaactttctgcaatggcggtttcttgttcttctgcaacaaaatgggtcgtcttcttgcttctggcgctgcttattcgagaagaagctatggctacaccacagatctctgacctcaggaatcttgaagttgaaagacacaggttgccgagcttgacgaactcgtcaatggcggagagggcaaaagaggctgagaaattaaatgaacaagctgcagtggctaacccagaggaagtggtttcaatggttgagatgagcatccaaaacagcacagagaggaagaagttgggatttttctcttgtggaactggcaaccccattgatgattgctggcg

SEQ ID NO: 143 - DNA, 394 bp, Glycine max
  Clone ID: 2DA-02-Q1-B1-D9
gtttagtgaacaaaaagttttttcaaatgattttactgaaaatgaaaaacccctcagttattctccacaatcaattcagggtgggcatcaggagtcagatgcccctcatgttgggagatcatcagctggacgtccttctcatgctttggtaacttttggatttgggggaaaactcatcataatgaaagatcctaatcttttgagctcatcatacggaagccaggattctgtacaaggttctgtttctgtgttgaacttgattgaagttgtcacgggaaatatggattctttgagcatcagacataacaccagtaactatttccatgctctgagccagcaatcattcccaggtccgttggttggccggagtgttggaagtaaggaactgtacaaa

SEQ ID NO: 144 - DNA, 348 bp, Glycine max
  Clone ID: 2DA-02-Q1-B1-E10
gtttcaatcgaaaccaaaacaaaaacatgggcagaaaattcttcgtcggtggcaactggaaatgcaatgggaccactgaggaggtaaagaggattgtgactactttgaatgaggctaaagtccctggagaagatgtcgtagaagttgttgtgagccctccttttgtgttccttcctgttgtaaaaagtttgctgcgccctgatttccatgtttcggcacaaaactgttgggttcgcaaaggtggtgcttagaccggtgaggttagtgctgaaatgcttgttaatttgggaattccttgggttattattggtcactctgaacggaggcagcttttaaatgaatcaaacg

SEQ ID NO: 145 - DNA, 331 bp, Glycine max
  Clone ID: 2DA-02-Q1-B1-E12
tgcttcgcgtggaccaacaagaagtgtaagttttcattcaatggccagcgctcagctctcagcaatatcttcgtcgatctctacggcgtcgggtgaagggcttcgaccttcggctgttcagtttgcttccgcgggcagaattagaattggcaatctctcccaaaggtctttccggggcttggttgtcaaagccgccaccgttgttgcccccaaatacaccgcgattaagcctctgggagacagagtgctgataaaaattaagggaacagaggagaaaactgagggtgggattttgcttccatcaactgctcaaacgaaacctcaaaggggg

SEQ ID NO: 146 - DNA, 241 bp, Glycine max
  Clone ID: 2DA-02-Q1-B1-E2
actgatatggccaaatgaaattgcaaaagaaggtggtgttatcagtgcaatactaaccagggtgctttctgctccttccattcctcattctggatcggggtctgctgcctctgttttgggcattattctaggttttagttctgaatactacttggaagttcctgttgctgttttggttacgctgcttctatctggcttagatagcactgttgttgcttcattaactgctcttcctgtgttg

SEQ ID NO: 147 - DNA, 381 bp, Glycine max
  unsure (1)..(381): unsure at all n locations
  Clone ID: 2DA-02-Q1-B1-E4
gctgcatatgattggagaatagcatttcagaacactgaggtgagggatcaaacactaagtcggataaaaagcaacatagaacttatggttgcgactaatggtggaaataaggcagttattattccacattcaatgggggtcttgtacttcctacattttatgaaatgggttgaagcaccagctccaatgggtggtgggggaggaccagattggtgctccaaatatataaaggcagttgtaaacattggtggaccatttttaggtgttcccaaggctatagcanggctattctcagctgaggccaatgatattgctgttgccaggacgatagctccaggatttttagataaccatctgtttcgcattcaaaccttgcaacat

SEQ ID NO: 148 - DNA, 399 bp, Glycine max
  Clone ID: 2DA-02-Q1-B1-E5
tcacaatggagtacggaaggttaggaccctctgatcctggtggctcctcgcgcctcaaccctccgagatcttccgggaggaaaaacattgtgtttctgtcactctttgctgtcttattaatagccgcgtccgctgttactgcagttgccgtccgctctcgcaccaaaaataccggaggggacggaactagtctcggcaagttcacacaggccatttcacgcacgtgcagcaagacacgctttaagatgttgtgcatgaaatcattactggacttcccgggatctcaaggagcatccgagaaggacctcgtccacatttccttcaacgtcacgctgcagcacttctccaaggcgctctactcttccgccaacatctcctacaccgccatggattcccgcg

SEQ ID NO: 149 - DNA, 406 bp, Glycine max
  unsure (1)..(406): unsure at all n locations
  Clone ID: 2DA-02-Q1-B1-E6
ctccgctccaacacaggggaaaatgagggagatccttcacgtgcagggagggcaatgcgggaaccagatcggttccaagttctgggaagtggtgtgcgacgagcacggcatagatccgacggggaagtacgtcggaaactcagatctgcaactcgagcgcgtgaacgtctactacaatgaagcctcgtgcgggcgcttcgtgccacgcgcggtgctgatggacctggagcccggaaccatggacagcgtgcggaccgggccgtacgggcagatcttccgccccgacaacttcgtgttcgggcagtccggcgccggcaacaactgggctaaggggcactacaccgagggcgccgagctcatcgactccgtcctcgacgtcgtgcgtaagganggcgagaactgcgac

SEQ ID NO: 150 - DNA, 412 bp, Glycine max
  Clone ID: 2DA-02-Q1-B1-E7
ctctcttcttgcttctctctcttcttgctcctctctccttttcaattactctctctaccaaggagtgatggctgtgcaactgtgggaaacgctgaaggaggccatcgtggcctacaccggcttctctccttccaccttcttcacggtgctggcgcttctttttgccgcttactacgtcgtcacgggtctttttggttcctccgacgaccaccaccaccgccaccgccacgcccaggaggaggagatgccgcctctgcgccccccggttcagctcggcgagatcacggcggaggagctcaaggcctacgacggcaccgatcccgagaagcccttgctcatggccatcaaggcccaaatctatgatgtctcccagagcaggatgttttatggacctggtggaccttatgcccta

SEQ ID NO: 151 - DNA, 347 bp, Glycine max
  Clone ID: 2DA-02-Q1-B1-E8
gtccctgctactttgaagaaacaggccaagccacctggcaggccctttggcggcccatccggtgatcgccctaggggtccaccacgctttgaaggggagcgtaggtttggtggtgatcgtgatggataccgtggaggtccccgaggaggacctggtggtgactttggatgagacaagggatgagctcctgctgactacaggccctcttttgggggtgctggtggaaggcctggctttggtcatggatctggtggttttggatcgccaaccagctcaaatcttccctaactataatgctatctgcgatattttttgttcaattttctaggaacacttgtttgtagttg

SEQ ID NO: 152 - DNA, 303 bp, Glycine max
  unsure (1)..(303): unsure at all n locations
  Clone ID: 2DA-02-Q1-B1-E9
ttttcttcaagcacgccctggattttcttcccctacaccttcaccttcaccaccaccaccacctattttttcttttctcgaaaaccctaagtgatacgtcgccgttttgtcgttctctctctgagttctccacaggatcaggaaccgaagcgttgaaatggggtaatatgatgatgatggtgatgaatcgaatttcgatttcctgaggtgacgaacaaagcaccaccaccaccttggctatgttcatgtangggtttgttgagaatcgtatagtttttttatttcctttatcaaaatcttcgc

SEQ ID NO: 153 - DNA, 291 bp, Glycine max
  Clone ID: 2DA-02-Q1-B1-F1
attggaggaaagcgcgatcctcgtgactcgcgacccctcgggtttaaatcccctgcgacgcagcacaggctactacttcaccatcgccggagaaaatggtcgacgacggagcaacctcggcggcgacgagccggagaaagccgtcgtggagagaaagagaaaacaacaggagaagagaacggaggagaagagcaatagctgcgaaaatatactctggacttcgagctcaggggaacttcaacttgccaaagcactgcgacaacaacgaagttctgaaagctctctgcgcag

SEQ ID NO: 154 - DNA, 394 bp, Glycine max
  unsure (1)..(394): unsure at all n locations
  Clone ID: 2DA-02-Q1-B1-F10
aattcattcatcaagtgcacaaccacaacaatctgttgtaactaaggtcacacagcacatgcagattcctcttacatatgcagatgctgttagaggagcatcgggcacaaatatcagctatatacgtcgtgctagtggagcaagtattacaattcaggaaacaaggggtgtgccaggggagatgactgttgagataagtgggacttcttctcaaatacaggcagcccagcagctggttcagaatttcatggctgaagctgcaagtgcgacacaggatcctatggggggatcagtcagccaaggttacagtgcctatccaacaactgctccagtttatgctcctccacccactancgctggtggtcatacaggccatgcgccttctgcagattat

SEQ ID NO: 155 - DNA, 385 bp, Glycine max
  Clone ID: 2DA-02-Q1-B1-F11
gaagaaggcatggagcagtggtggatgtggtcgggtaggagcactagagatgggaagctgcccgggacccatagagacacccgctcttctccgatctaggcgtaaagggcttcctcactttatctcccctgacctactcacttctctcccttcccccgattcccatctccttcaaatttctccactccactttttggaaggacttgcttcaaccacgatatcgaaattaggatggcttcaccaaatgcttggtttgcaccaatatggaatggcggctgttgccagtgattccattcaatgccttcctgagtccatgggatctaccatactcggagcctcttttgaaactccttttggtcgtctgttgattaaacccagagattat

SEQ ID NO: 156 - DNA, 354 bp, Glycine max
  Clone ID: 2DA-02-Q1-B1-F12
ctcgagccgatagagttaatgtgaagggctactatatatggtcattttcagatagctttgaatgggatgctggttacacagctcgatttggcatcatatatgtggattacaagaacaatttgagtagataccctaagtcctctgcgttttggctgaaaaaattccttctcaagtgatctaaatctattgttcctttggcatgcatgcccagtttttcttcttgtttgtttcctggatatcacagacatgcagtgtgtatcacttgctcttcgattcggatcaatgtaatcaagtcatcgttgatatcaaataaataatggcatgccagagaatggaataaattatcttttcaac

SEQ ID NO: 157 - DNA, 383 bp, Glycine max
  Clone ID: 2DA-02-Q1-B1-F2
gcagctagttcaattaaatttgcaaaacatggaatttgataatgaagaccattatgcaaaactacttcgagctcaaacccacatatttgatgagaacttgcggattcataaactctatgtcccttaaatgtgcaattgatttgtgcatacctgatgtaatacacaagtatggccaacccatgccactctctcaactcattgcttcacttccaattcacccttctaaggcttgcttcattttccgcttgatgcaaattttgactcattccggtttcttctctcaacacaataatggcaccgaaaattatgagcaagaagaagtgagttatgtgctaactgatgcatctaaactactccttaagggacatcactttagtatgatt

SEQ ID NO: 158 - DNA, 409 bp, Glycine max
  Clone ID: 2DA-02-Q1-B1-F3
aagattctaagagagattttgctgctctttgaagaagggtgtttgcttgattttggagatgtcgctgctctcagatctcatcaaccttaagggctcagagactactgagaaggtgatcgcagagtacatatggatcggtggatcaggaatggacctgaggagcaaagcaaggactctcccaggaccagttagcgacccttcaaagcttcccaagtggaactatgatggttccagcacaggccaagctcctggagaagacagtgaagtgattatatacccacaagccattttcagggatccattcagaaggggcaacaatatcttggttatctgtgatacgtacactccagctggagaaccattcccactaacaggaggcacgatgctgccaagggtttcagccatcctg

SEQ ID NO: 159 - DNA, 386 bp, Glycine max
  Clone ID: 2DA-02-Q1-B1-F4
tgccttttgagtgtagctagccccatcttcacgtgatctgctcttaacccttttgttttcttctcctcgtttctatatcctattcctatgtgggcagggtcccccatcttcctccacctgcatctccactatattacaattactactttctctctctttgtaacttgtaagcatggagtcctcaaagatctatgcttacctcttcctttgcatgctcttcctctcctccgccactcccattctcggttgtggctactgtggcaaatcccccaaaaagcacaatcctggtaaaacaccaaagacacccacagtacccgttgttaaaccatcagtcacaatccctcccattgttaagccatcagtcacaatccctcacattgttaatc

SEQ ID NO: 160 - DNA, 388 bp, Glycine max
  Clone ID: 2DA-02-Q1-B1-F5
gcaacaccggcgtctccctccttcctctcctctctctgcctttacctttgattgtaggtttttcattatttggcggcgaaacagggttgaagtatttttgttttagcgtctgagctttgaattacagagcaaagtgaagcgtgaacatggtgatgcatctaaacgggacaccgtgcgctctcggattccacatgcctgcggagtgggaaacccacgcgcagtgctggatgggttggcctgaacgtgccgataactggcgtgacggcgccgttcacgcccaacgcgtgtttgcgagggtagcgtcagcaatctcaagattcgagtctgtaacagtttgtgttagttctgcacagtgggagaacgcgcggaatcagctaccggagcatat

SEQ ID NO: 161 - DNA, 379 bp, Glycine max
  Clone ID: 2DA-02-Q1-B1-F6
gcggtttggtttgaaatttaacaataacaaatacaacaaacagtgacatgtccttgtttgttgtatttgttattgtggtcaactggtcagcgtctgcaattggtttgaagctaagtatattcctgtatattacacttttcctagtgcatttcaaaatcttggtgcaactcagaatgcaatttccacagattgactttcgcatgattgcaacgtactgccagactattatttccatttcttaaacaaaagaaaagtaatttataatgctttcatgcaggtgctgaggttgctgttctttgcatcaccaaatctggggaggttctaaattatcaggcattcactgatgctaaggggatatacacagtggccgagacaatgc

SEQ ID NO: 162 - DNA, 374 bp, Glycine max
  Clone ID: 2DA-02-Q1-B1-F8
aaaccctaagagatgaagagaactcctatcttgttccctctcttctttcttctttgtgccttcacctcatatctaccttcagccaccgctgatgatgatcatgtgtacgacactgacggcgataagcttcaatacggtgtcaattatttcgtgttgccagtgataagaggaaatggcggtggaatacaagtagcataagcaggaaacgaaacttgccctctgactgtggtgcaatctggcaacgagctctctgaggggttaccgataaagattgcatctcgatcagcaggagtcgctttcatcacccaaggccagcttttcaagagcattcagttcggtgtgtttccatccacactcagaccaaggtgtccccc

SEQ ID NO: 163 - DNA, 407 bp, Glycine max
  Clone ID: 2DA-02-Q1-B1-F9
ctcgagccgcgggaagtacttcaaatcgagctgtttgtcaggtggaggactgcagtgctgatctgagcaaagctaaggattatcacaggcgagataaagtttgtgagatgcactccaaggccagtagggcgcttgtgggaaatgcaatgcagagattctgtcaacaatgcagtaggtttcacctgcttcaagagtttgatgaaggaaagagaagctgccgaagacgtttggcaaggcataataaacgaagaaggaaaacaaatcatgaagctgttcctaatggaagttcattaaatgatgatcagacaagtagctatctgttgataagtttattgaagatactttcaaatatgcattctgacaggtcagatcagactacagatcaggatctactaactcatattctg

SEQ ID NO: 164 - DNA, 405 bp, Glycine max
  Clone ID: 2DA-02-Q1-B1-G10
ctcgagccgaagagcaagagcaagagcgaaagcggcagagaagatggaaggagaagagggttctcagcagccacagttggtgctcgcggagaagctagtccttctccggcaacccgatgtgcaagacattgacaaggttcgctacaaagaggatgtcttcactcatgtcaaggaaaacgatatggtccctctgtacgaaaccctagtcgctgattccgtgttggacttggatcgtgcccttttggactctatgcgcgctaaaattgacgacgagctcaccaagctcgacgaaaagattgctgatgccgaggaaaacttaggagagagtgaagttcgtgaggctcatttggcaaaatccttgtttttcatccggattatggacaaggagaaagcttgggacatctg

SEQ ID NO: 165 - DNA, 59 bp, Glycine max
  Clone ID: 2DA-02-Q1-B1-G11
aacatggatcaagttcaaagttaatataaagattttatacgcccgtttaagacaatgtt

SEQ ID NO: 166 - DNA, 346 bp, Glycine max
  Clone ID: 2DA-02-Q1-B1-G12
tagtccatatcttcaccacttgccacaccacatcaagatcctacctacacccgtttgcgttgttgtttgcaaataaatagctgactaacaatgagcgtgtgaacgtctaaagagggtgatttgatggggaagagggtgttcgtgagggtcgatctgaacgtgcctttggctgacaagcttaacatcgccgatgacactatagtccgtgctgctgttcccaacatcaagtacttaactggtcatggagccaaacttatcctttctagccacatgggacgtcctaaaggtgtatcacctacatacagtttgaagcctcatgtaccaaagctgtctcaacttctcggga

SEQ ID NO: 167 - DNA, 396 bp, Glycine max
  unsure (1)..(396): unsure at all n locations
  Clone ID: 2DA-02-Q1-B1-G2
ttttctctctgtctctctctctcggtctcgctcttcttctcatcaagcacagagttacagactcaccgatcttccgattctctttcgtcttggtttaggagctcgaaggagagacccactcttggtggcacgcggattaagacccgcaaacgaaatattgctgcgccgctggaccctgcagcattctcggatgcagtggtccagatttatttggataatgctggtgatctggaacttattgctaagagtattgaatcttcagaccttaacttttcaagatacggtgacaccttttttgaggttgctttcactgggggtcgtacacaacctggaactaccaagcctgatgagggggaacgccanccatactctataatagagtgtgagcctaagcgt

SEQ ID NO: 168 - DNA, 398 bp, Glycine max
  Clone ID: 2DA-02-Q1-B1-G3
gttcatacttgtttcttcaatttcatttcttttattacttttcctctttgcattccaaatggccactgttgaggttgcacaacaaacaccaagaactgtgacagaaaatgaagcaaccgaggtaaccaagattgaggaaactaccccagaacaaccagctacccaggttactaccaccgaagaaccaaaggaagaaaccaccaaagaagcaaaagaggaagaagaagccccagttgagactaatgaggcaacagaagtgacagaggaagtgaagcctgaggtagaagagaacccagcacctgagagaacagaagaagaagaagtgaaagaggaaactaaagaaaccgaatcagcaacagtggacgaacagaagcaagaggagaacaaaccagctgaaa

SEQ ID NO: 169 - DNA, 387 bp, Glycine max
  Clone ID: 2DA-02-Q1-B1-G4
ctcttccttttctcttctctgtctaaggggtgccctgagatcacattgaacaatggtgaaggctgtggccgttcttggcagcagtgagggtgtcactggaactattcacttcgttcaggagggaagtggtccaaccaccgtaactggatctcttgctggtcttaagcctggtctccatggtttccatgtccatgccttgggggacactaccaatggttgcctctcaactggatcacatttcaatcctaataacaaggagcatggtgcccctgaggatgagaatcgtcatgctggtgatcttgggaatgttaatgtcggtgatgatggtactgtcagcttcactattactgacagccagattcctctcactggaccaaacaacatcat

SEQ ID NO: 170 - DNA, 391 bp, Glycine max
  Clone ID: 2DA-02-Q1-B1-G5
ggcctagttgttgttttctcgatgagaaaggcttcttccactatgcattgcgcacttctgcgcttttgggttcccttgttgctgcttgctagcttcagctatgctccttctgtttcggccacaactgaaatttcagggaatgaagtgaacacagatgggaaggtgataaatgaagagttagcaaaaccaagtctaaaaggacatgatgaagaagcaaagttcaaaggattttttccaaaaccaattcctatagttaaaccaattccaaagccaattcctattattaaacctattccaattccagtttataagcctattccaaaaccaattcctattgttaagcctattccaaagtcaattccagttgctaagccaattcctaatgaagaag

SEQ ID NO: 171 - DNA, 384 bp, Glycine max
  Clone ID: 2DA-02-Q1-B1-G6
gaattagggttttccaattcacagagcaacacaacgaaccaacaatggcgcagcctcagccgcagtcgcagccgcagcacgggcaagcagcgctggagcaggtgcagtgcttcggtcgcaagaagaccgccgtggccgtgacctactgcaagcgcgggcgcggtctcatcaagatcaacggctgccccattgagctcgtggagccggagatcctccgcttcaaggccttcgagcctatcctcctgttgggtaagagccgcttcgccggcgtcgacatgcgcatccgcgtcaagggtggcggccacacctcccagatctacgccatccgccagagcatcgccaaggcgctcgtcgcgttctaccagaagtatgtcgacgaacaga

SEQ ID NO: 172 - DNA, 305 bp, Glycine max
  Clone ID: 2DA-02-Q1-B1-G7
ggaatcatctcaccagattaagatatctcttacctcctgccttagaactcacatcttgtgacagacagcatctcgaaacctctccagtaagagagtcggttgagttctctgctcaatccgaagatcaagggagacctaaggcagttgacatcactggacacgtcgggcacagcgtccacggaatcatactaagatgggtacagcggaactctctaatgcagaggacaacgacgctctcatggtggctacagtcgacacagtcgctaccgcggctgtagttcgcaccgatggatctctcgtcatcg

SEQ ID NO: 173 - DNA, 402 bp, Glycine max
  unsure (1)..(402): unsure at all n locations
  Clone ID: 2DA-02-Q1-B1-G8
agcagccaaacactctctctctgtctctcgaaaattctcagtttgcagagaaaatctgaatcatgtcgtggcaagcgtatgtcgacgatcagcttctgtgtgacatcgaaggtaaccacctcactcacgctgctatcatcggccaagacggcagcgtttgggctcagagtaccgacttccctcagttcaaacctgaggagataactgccatcatgaatgactttaatgagcctggatcacttgctccaactggattgtatctcggtggcaccagatatatggtcatccagggtgaacccggtgctgtcattcgagggaagaagggtcctgntggtgttactgtgaaaaaagacggtgcgggcttgatcattggcatttatgatgaaacaatgactccaggtc

SEQ ID NO: 174 - DNA, 404 bp, Glycine max
  Clone ID: 2DA-02-Q1-B1-G9
gccagcgagtgagtgagcgagccaggtagggttttcggtgttcccctctttgtgttcgttcgcgacgatggggtccatccccgatccaggcgagttgagcgagttgactcagccgagcttcgacgagttccagcgccaaacctctctcatgaccagctgcaccctcctctggaaggagctctccgaccacttctcctcgctcgagcatgacctcaaccataaatccgaagccctcaagcgcaagattcacaccctcgacaactccacctcggactccctccgcctcctcgaccatcgctaaacgtctctcgacgccactctccagatcgccctccgcacgctcgacacgcgccgcaacgctgctctctccgcgctccctcacgacgctgacgacacctcccccg

SEQ ID NO: 175 - DNA, 425 bp, Glycine max
  Clone ID: 2DA-02-Q1-B1-H1
gcaagccttcgttaactccgaattccgctccaagtgagaaagaacctcactctctcatttgtttcggtttggtcgtgcccactgtcctgtttgtttcggtttctgttttcctttgaaagcagaggaatcaggtcaaatcaatccttcaccgttcgttcattcgttcaattcagttgaattcctttccttcggtttttcttttttttttcccctcaaaaataaaaaatcggaactttgctttaaacgtggaaccccaccctgagatttcgcccccagaatcttgatccctttatccagaagggtccttgttggtttttttcacattggggttcttgttgttgtggttcattgctcgtggaaaagaaatggcgacgagtatagggataatggatagcgcttactttgtcagcagaaacgagattctc

SEQ ID NO: 176 - DNA, 309 bp, Glycine max
  Clone ID: 2DA-02-Q1-B1-H10
caaaaaccaatgtagccacagatacaagtccatcagcctcatcagcaatgcttactgatcaacaatcggaacttaatactgatgatctttcaactgaggcggaagttgaaacagccttgaaaaatgctggtctgttgtctgattccccacctagcagtccacatgagagcagagaaacatgtaatagtgatatgtcagggcctgataatatacttgaactagattctcatcctgatctggatatttatggtgattttgagtatgatttggaagatgaagattatattggtgctagtgttacaaaggtct

SEQ ID NO: 177 - DNA, 301 bp, Glycine max
  Clone ID: 2DA-02-Q1-B1-H11
tcttattcaggaatttggagagtattgatatatcaaggtaggataaaccagtagccaaggaagatatggagttttctatgattttcattgtgagcaacattatgctgcttttcagttcagcatttgccaaaactgctagtcctccctctctgagcccaactccagcaccagccccggcaccagacttcgtgaacctcactgagttactcagtgttgctggtccgtttcacaccttccttggataccttgagtccactaaagtgattgacactttccaaaaccaagccaacaacactgaaga

SEQ ID NO: 178 - DNA, 303 bp, Glycine max
  Clone ID: 2DA-02-Q1-B1-H12
gtccccacttcaacaggagcagcaaaggcagtggcccttgtcctcccaaccctcaagggcaaactcaatggcattgcactccgtgtgccaacaccaaacgtctcagtggtggacctcgttgttcaggtctcaaagaagacctttgcagaagaagtgaatgcagcattcagagagagtgcagacaatgagctccagggaatcctctctgtgtgtgatgagccacttgtgtctgttgacttcaggtgcactgatgtgtcctcaaccgttgactcatcgttgaccatggtcatgggagatgacatg

SEQ ID NO: 179 - DNA, 405 bp, Glycine max
  Clone ID: 2DA-02-Q1-B1-H2
ctcctcttcacacattttcttagctctctccaacaatccctctcgttcacactttcagattgtgtgaagatgggggctggtggccgaactggggttcctcctgccaacaggaagtcagaggctgaccctttgaagcgggtaccatttgaaaaacctcagtttagtctcagccagattaagaaggccattccacctcactgtttccagcgctctgttctccgctcattctcctatgttgtttatgacctcaccatagccttctgcctctattatgttgccacccattacttccacctccttcccggtcctctctctttcgtggcatgggcaatctattgggctgttcagggttgcatccttactggtgtttgggtcattgcccatgagtgtggtcaccaagcattc

SEQ ID NO: 180 - DNA, 400 bp, Glycine max
  Clone ID: 2DA-02-Q1-B1-H3
acctcatcatagttttgctaacacaagtatacactcattctcaaaaggttttcatccaatttctttccctctcttttcattggtgtgcacttgcacttgtggagctgcatcaactgcagtggaaattgtgctttgttcttgagatgtctggtgttcttctttgggtgagttgtggacccaaagagaacatcaactccttggtgagtttttcatgcaggagtagtagtggtggtgaaagaacacaaaagagattttctggaatcagttttgctaatggtacttctgctttttcaagtgcactggcagctactgagacttcaagatcttcagatgagaaggtctatgaagtggttctgaagcaggcacctttggtaaaagaacacaaaaggggtacaaaaat

SEQ ID NO: 181 - DNA, 304 bp, Glycine max
  Clone ID: 2DA-02-Q1-B1-H4
caccataccaatcaaccaaccttgttgcttcttgtgatcactcctgaaccacactaatggatattgatgagtgggagtttctctctgatgggggctagcttgatttcaatgaagagggtgggaagcaaaagcaaaagcagaattcctttggaaaattggactccgagggcatctttgacatggactacttttgctcatcaccaccaccaccaagggtgagaactcaactagtccctttgccaattcaattggagccaaaaattgggaaaggcccagaagatattttggtgaaagacatcatcaa

SEQ ID NO: 182 - DNA, 412 bp, Glycine max
  Clone ID: 2DA-02-Q1-B1-H5
attcatcgccgagcatcagatccgaaatgtcgatcggagatgcttttctgtgcttactgttcatcgcaacttgttggatttccgctgcttctgctgattccatctatggctgcggtggatttgtcgaggcgagctcatcgttggtgaagtcgaggaaacaaactgatgccaaattggactattccgatgtcacggttgagcttcaaactgtggatggactggtaaaggatagaacacaatgtgctcccaatggatactattttattccagtatatgacaagggttcctttgtaattaaaattaatggacctccaggatggacatgggattcagaaaaggttcctgtggttgttgacaataatggttgcaatggtaatgaagatataaaacttccgtttcacaggattcacta

SEQ ID NO: 183 - DNA, 349 bp, Glycine max
  Clone ID: 2DA-02-Q1-B1-H6
cacaacatgtggatagcaggaaaaacgagtgtatagatcaacaactacccttcccttttcttctatcactcccatcactcttcttcttctgcttcacttgtacactcttcaaccactcaacaaagtggttggtttttggttcttaagccatggcatccacatcctctctgcatctgtctcaggcccttctggcacgtgctgtgtaccttcatggctcttcttctgaccgtgtctcactctccttcccatcattctctggcctcaagtcacattctccatgcaaagcagcagccacgtcctcacgtagaaagggtggttgcgcttccaccaccgttgttcgaacccgctg

SEQ ID NO: 184 - DNA, 392 bp, Glycine max
  Clone ID: 2DA-02-Q1-B1-H7
tgaaatcaaaaaccctagccctcactctcatcactttttttgagctatgtttcaagagagttagttagggataatagggcagggaagaataagagggatgtacaaagaacgagagcgagttggtgtttctgtttccgcttccaaatcggaggatcggaagcgaatcaacgacgttctcgataagcacttggaacgatcctctccttccacttctcgccccatcacctccgcctccaagaattccaacctccaagtggaggaatctgaaacggagagtgaagagtctgatgttagtggctctgatggggatgacacctcttggatctcgtggttctgtaatctcagagggaatgagttcttttgtgaggtggatgatgattacatacaggatg

SEQ ID NO: 185 - DNA, 193 bp, Glycine max
  Clone ID: 2DA-02-Q1-B1-H8
gaagtatcgcctccatcactctggggtttggctttttccttctttgaacaacaaaaccccaatctgtttccttagccttcaactcactagggcaaggatcaacaccttctttttactttcatattctctcctctttcattatccatctctacaaagttctttcactcaaacatatccttaagatacctttact

SEQ ID NO: 186 - DNA, 400 bp, Glycine max
  Clone ID: 2DA-02-Q1-B1-H9
attggatggtccaaaccatgatcttcctcgtgtcaatcttttgtctatgaaagtaaaagcatagctaaaatgttgagtacattaaaaaaaatatatagtcaactaaattaactaatattgagtttaaaactatctggaccttattttgaatacggcagatagagtagggcggttctttttttatgatttaaagtttgtttcaaactaagatggttacgtgaaactataaaatttatgaatgctttttcattaaaaacaaaatttaaattttgcaaattgatttctctattgctcatttcccgctattacgttgcgacgattgacgattctctatttttatttattcacttatttatttattattatggcaaacagccttggatttttatattgagcttac

SEQ ID NO: 187 - DNA, 373 bp, Glycine max
  Clone ID: ASG32442DA-01-Q1-E1-A1
acattgaaacatgtagtagaaatggttttattggagagttgacatccaaacatggtccatgataaagtgaaacggcattacaaaaagctgcaaacctttctcataatttctttcagatttaatggaaacaaaatcttatgagagaatatgggaattggagtcctttccagtgggttcgctttgtaaggacatgagcatcatcatccaacaagatacaaacaatccaatttggttggatatgtccctcccgtattatttacctgagtttgttgaagactcatatatactattagaatggtgctcaaagtgcggctatgcactcaatttcaatcttggcatccattggcaagccagctacttgataggttgaccg

SEQ ID NO: 188 - DNA, 343 bp, Glycine max
  Clone ID: ASG32442DA-01-Q1-E1-A10
ggaaacttcacagtctgtgtttaagatcaaattcctagtttcagactttcagcaattccgcatgattcatatccagattcatagtgtggcaggtgaaaacatgcatgcagcatcttctatgatgaataagcacccagtctttctctgcacaagtaataaaagtagtgaatacatttccagcaatcctgcaggttcacaatcaatctgtggaacatatcaaatccatagttccatttcttttgcagagattatggctcagtactctcttctaacgcacgttttgactccctgtcgtctgagatgacatctgaacggtcttcaggagcaatggtcccatcaacaa

SEQ ID NO: 189 - DNA, 319 bp, Glycine max
  Clone ID: ASG32442DA-01-Q1-E1-A11
accaagaaattaggcaaaaaggccaccgaacatgtattataaattgaaaaaaaacgaaaacaattacaaacccaaaacgagtttttttcttttttggtgttgttgttgttacaaaccccaccaaatttgaaaagtggaacacaataatgaaacaatatattaggcatcccaaatggccaaactgcacaaaacaacagtttcaatgggaagtccaggtccaaaaccgaacaacacaccccattcaagtccatcacctggggttttaagcccattttcagcaaatttccacctcaactcaaccaagatgaaaagaacacaa

SEQ ID NO: 190 - DNA, 347 bp, Glycine max
  Clone ID: ASG32442DA-01-Q1-E1-A12
tatgcaatgactgctttactcactttagttaagaatgaatctgaacatttcgcccaaagggagtagagaacagatgatcatgtacatttttatatgtatgatctactgttgtatacaaaattgcaatgaagcaatgtacagaaaacgagggtgaaattatgtgcatatcaagtatctaaagctgaactcatatggcataatttgtacaaattgtgataacggctcggtttttctttccacaaggaatttaatggcttcgttccccagttcacttggtaactggagacagatccaatccagcaatgattccaagtcatttgcaaagttcagcaaataccaatccagca

SEQ ID NO: 191 - DNA, 304 bp, Glycine max
  Clone ID: ASG32442DA-01-Q1-E1-A2
gggtcgaacttatatttggattccaaatatgtattctttgataatgatagaaagaatttgaaaacagacttcattacaaaccatgttacttacaatagtaatatatttatcaaagcaggagaagattacatctgctgggaagaatataaaagaatgaaattggtatgtctataaaattgtcaatttctaaacaattgtgtttacagtgaatttactgctcagacaaataaattcatccttatcatcatcggcttcaacaggaaatatctgggataatacaactccaatgttgatgagaaacaca

SEQ ID NO: 192 - DNA, 166 bp, Glycine max
  Clone ID: ASG32442DA-01-Q1-E1-A3
aaatatggaacaagggcataagatttattaaagccgcctaagagacaacaagtaagtacctggaatgtctctaagtgacataccccacataacataaagtgacatttaacaaacatagctaaggctcctatgtgaatagtgcatatcagcataccttattacatat

SEQ ID NO: 193 - DNA, 223 bp, Glycine max
  Clone ID: ASG32442DA-01-Q1-E1-A4
agggggaataacataagaatcaaaattcaaggtatttgaccacacaatcatcataagatcaagggaggtttagatactaaacaacccagaccatataggataatttcaaggcgtcctggccatctaaattgcccaacccatcggcacctaaatatccaagatctaattcaaatccgaccgaaaaaagaaacaccatacacattctacacatcaaaactccgct

SEQ ID NO: 194 - DNA, 145 bp, Glycine max
  Clone ID: ASG32442DA-01-Q1-E1-A5
gatatatagacgaacgtgttgtttacttaagtgctcagattcagcacaataaatgcaatcacaagaatagcaatcatgtcatagcaacgatatatagaaaatggcactatataaatatgtcgtactaataaacattggtgtaaga

SEQ ID NO: 195 - DNA, 398 bp, Glycine max
  Clone ID: ASG32442DA-01-Q1-E1-A6
taaaggcaaacattttcttttataaataaaaatacgtcacattgttgtactctttttactactacgaggtaatccaccgacggtgagtacacatcacagattttctcttttactaatacaagataggggtagtacatcaacaatgagtaactaaataacccatcaacatttgagtaactacgtctcaacaatgcgagcttctcttaattttcttatctacattcccgtctaattcctatgctacctgtcgtaagggcattcgagatcattttcagtgaccttaaaatgctgaggacgttgaccatagcaatgcagattccacattttaaaatatgatctctcaagattcctcatccagcgggcagtgtcaaatagatggcaagtcaagcgtacagctt

SEQ ID NO: 196 - DNA, 257 bp, Glycine max
  Clone ID: ASG32442DA-01-Q1-E1-A7
gatatatagaggaacgtgttgtttacttaagtgctcaaattcaacacaataaatgcaatcacaagaatagcaatcatttcataacaacgatatatagaaaagggcaatacatatatatgtagtactattaaacattggtgtgaaaggctgaggttaacttgaaggactctcaactacatttgtaagatatattgagaaaaattgtgctcacccacatattttacagagatttgtgtcacgcatcaaaaacacactca

SEQ ID NO: 197 - DNA, 350 bp, Glycine max
  Clone ID: ASG32442DA-01-Q1-E1-A8
ctatatgtatttttttctaatacgattgaaaaaatattaacatagtaaatatacagagtacatatatcctttacatcataagtttctctggagtacagccttctttggggtttccctttgtgagacaacttataatacaaaagcgagaacataagtactactatggttacacatattctgctggtccaaccttggcaactgaagaaagttatcaagcagatcgcaaatgctcacaagtggaccgatgctgcatctagctgtgttatgtatcacgatggcatcccttattttttgaaacttggcaagtgaacatgaagatgattcaagctgcacctcagttccacgataaa

SEQ ID NO: 198 - DNA, 366 bp, Glycine max
  Clone ID: ASG32442DA-01-Q1-E1-A9
tgtagaaagaaaattgatggataacagcttacaaacttgaattcagagtgtacatgcacaagcacaaagaacccaacagatacgttgctgaacttttaccctataactggacagagttcaacaaaagcctccacattagtttgtcttgactctcgtgtaatctcttctcacctgtatccacatcaaatttgaggtactctagaaaaacgaataatcattatttatgtgctgataaaattctggtaattttgattttgtgtaacaatcgattatacagtgtacacggaaaaaaaaaaacaaaaatattgcaccacgatttgtcactttcaaatttcaggaatttccccttattttaacccaatcttc

SEQ ID NO: 199 - DNA, 328 bp, Glycine max
  Clone ID: ASG32442DA-01-Q1-E1-B10
cccaaatgagagttgctatttgttaagaaagtgttaacaaaagagaggcaaggaacgaaatttgtttccgacgaaaaatacaaaaatatcgaccttttgacaataataatgtcaaggtacggatgcccatcgtcactcccccaaatgaaagttgttgcggccttttgtactccattggctaaaaaagaatctattcaaagtgttcatacagatacaggggaaaggggaaccagatcactatcttattgtttcctatgctgcaattgctgtcatgtacctccagctttcacgactaagtcctgacaagtgaaccttcaaattcaaattc

SEQ ID NO: 200 - DNA, 330 bp, Glycine max
  Clone ID: ASG32442DA-01-Q1-E1-B11
gatttgaacatcacccagagcataattatattggcagatagaacacagagccataactaggacacatgatactcttttaaattactattatacgataacatgttcctctcataccaaccaacataaagacgcatacatattaaactcgtggaacaacctcctaagtcctaatatcataaccaaaacccacaacacacgaactatgattaaagacaatttttcaactcagataacagataactaaggggcatgcattgcatgtgctcagcacttgagttccttcaatccataggcaaagtagataaaagttggatcagttacaccttcctt

SEQ ID NO: 201 - DNA, 347 bp, Glycine max
  Clone ID: ASG32442DA-01-Q1-E1-B12
gcttgtcttgcggaatctcactatttgcaataagttgcaactgtttctacaacttcattgagctcaattgatgttcttgccatatatattaggcatgggatcaaaacattttcatgtatacaaccaacatcttaatttacttatcatgaggttcgtccattccagagtaataatgatgaaaagcacatgaaaagtctttggcttcatggccaacgctgcagagctcagtatatatcttttgtgcttgtgatgttagtgggtatttacatccggccagcttagctgattctaccgctagattcaagtcttttgccataagcttggatgcaaaccctccgttataatcc

SEQ ID NO: 202 - DNA, 366 bp, Glycine max
  Clone ID: ASG32442DA-01-Q1-E1-B2
ctaatacgaaaaaaaaaatataaagatagtaaatatacagagtacatatatcctttacatcataagtttctctggagtacagccttctttggggtttccctttgtgagacaacgtataatacaaaagcgagaacataagtacgactatggttacacagattctgctggtctatccttggcaactgaagaaggttcagcacgcagatcgccaatgctcacaggtggaccgatgctgcatcgagctgtgttatgtatctcgatggcatcctttattttttgaaacttggcaagtgatcatgaaaatgattcaagctgctcctcattcccacgataaaagtgggagtaaggaagtactttaacattcag

SEQ ID NO: 203 - DNA, 365 bp, Glycine max
  Clone ID: ASG32442DA-01-Q1-E1-B3
tttgtctcaacaaatacaaatattgatgcaacatttagataattgcagacattttgtcctctattgtatgttacaatctgctgtgatacaggaaacagggtattctacataaccatcgggggttgggtgataatgagtagcatgtatctctaaatctgcttttacagggcaaccgaatacaataaagataccaacataaatatcatattaaatagaaaaggaaagcgcagcattctcatatggaaacaacacttcacgagcctagaaacgggcattgcttccttgcatgctctggaaccaatttcaccaaaatctcagatgggactcctttcagttcatgggatttgaaattaaatagtggtgga

SEQ ID NO: 204 - DNA, 348 bp, Glycine max
  Clone ID: ASG32442DA-01-Q1-E1-B4
ttgaaattaagacattcatattttaattgaaagataataaccattaaaggagcaacactgttcaacccaaccaaaacaattacatcagtaaaacaaagttcatgtccacatgttatgtaattacaactttgtacattggatggttctaagtttcaaaaagtaagctacccattttttacgtaatgttgtgatcgcctccgggtctagtgccgagccatcaccgaaccacacactccaatcactcttcaactctgcgccaattatgttccacatccaatgcatcacataatacccacactcatagcctccgcgttgaatgtgagtcttcagttcaagccactggggtcc

SEQ ID NO: 205 - DNA, 104 bp, Glycine max
  Clone ID: ASG32442DA-01-Q1-E1-B5
ctattcaatatgtacatgtttcttcccatggctttaacaattaccacacataacaatgatattaatattaagccttggaacatatttaactcatcaaagacagc

SEQ ID NO: 206 - DNA, 284 bp, Glycine max
  Clone ID: ASG32442DA-01-Q1-E1-B6
aactgaaccttttataattgcagtggcagaaaaaatattttagacagaaatccgtacataaaaatctcccccacccaccccccatggagaaaaccatttctgcaaatttgagtatcccctattagcactagacataaataaatattttccgctatgagcatcttctctatccccctaaaataaatttctctaacttccttgatgtaagaggttccagcggccggaacgtctccaaccgcaagttggagctcgtgcagatctcactcaaaacagcatcacccttc

SEQ ID NO: 207 - DNA, 387 bp, Glycine max
  Clone ID: ASG32442DA-01-Q1-E1-B7
gtctcattattttttttttttttttaaaaattgaggattttcaacaaatttcaacaaatcacgagtgtcaaagcgtatcacaagcatcctcgaaaggtcttttccaaatacactaaggacaaaaggctgaagcattttttttcccctttgatggccttcggacaaaaatcagttaaccatgttagcttcgttttcttttcccccatggcatccaatttcaaagactttcaattttctctacaagaggctctcttcgaaagccaaatctgtaaccttctcatcccccatttttctagacaattttggatgagcaagggacctaaatctacgacgttacatgccaccaattactctcacaattacaatccgaaaccccccttcccgaaa

SEQ ID NO: 208 - DNA, 259 bp, Glycine max
  Clone ID: ASG32442DA-01-Q1-E1-B8
ttatctttatcatgcttgccaaattaagatcaatcacccactaatttggagatccataactgatcgttcatgtcgcacacatttacaccattatctgactaacttgttcctaaactgaacgtacttttactaataacactcgtaatttttttcccaaacattatcgtgactatgcgaaatatatatcatatttacagcggtatagtgaaagactcactacgattctactagcttgtggtgatctccctcagcaactcag

SEQ ID NO: 209 - DNA, 377 bp, Glycine max
  Clone ID: ASG32442DA-01-Q1-E1-B9
aaaaagcatcaccaattaacattaatggttaataataatgaaaatattttgggacagccacaaataaaagaagatttcgttactcccccacaataatgaataataacatacaatgaatacaaatgaaaggcagataaaaacaacaatgatacatagctacctaaacactcatttcatttgacccttcatttctccctatcttcctctcccttcttaatcacatcatatcactcatcaaataatcacttctctctcttctagttctttctctcaaggtatagatttgcattaggtgtctacaaatcattattcagataaaaaaaaatatagcaaagtacatgaatgaagcctatataatattatcaattacaaaatac

SEQ ID NO: 210 - DNA, 398 bp, Glycine max
  Clone ID: ASG32442DA-01-Q1-E1-C1
tttgagaacgacggaaggaaaaaaaaaaccctctccaaatgagtttcattcgaacaacaaaatttgcataggtttacacctatatttgattttattcagaggacaaggctccagtgacaaacaaatgtaagatttcagctcaacaacatcggaacatctaacaatcataaactttggctaataaaaaaaaacaaccataaactttggtctcttttttcaaggagataactgtgatgcttttggtgatatccgtccacacagacgccaggttgcaccagcatgaaacatagacttctcaaatacccatatatcacggacaagaacctccttgcttttatctccagctaccacagaaccttttgagtcatatgcttcaaatttctgtttagccaaaatct

SEQ ID NO: 211 - DNA, 352 bp, Glycine max
  Clone ID: ASG32442DA-01-Q1-E1-C10
actgaaattcttgatcaacctatagaatgaattgcaacaattattaattattatttatacttgatgaactttacaagtccatttatcctctcaccactctcctacctgcacttcctaggattcctttttaacttcatttagaagaaacaccattattagagaataattaaacttaaaaactctaagattcaagaaatcctttattctccaagtaagtaactacttgtccagccatcatagtaggtgttggacaattcccattttcctgctttatttcaatctcacaatttatgggcggttcataaggatcatcaatgccggtaaaacctttgattttccctgcacgagcaag

SEQ ID NO: 212 - DNA, 339 bp, Glycine max
  Clone ID: ASG32442DA-01-Q1-E1-C11
tttactaacacaagtctctttagtaatgacacatacaaatacattcagccactccaaatacatgacttacgcatacacaactgattaaggaatctggatccatcaagttcacatttagttaatgtcaaggtcagtacttaagcacccatatggtctatagataggcataccgttgggaaatccacagagagtcaatccatcctcactataatgggagaccagagtgtaaggcattttatcaggcccaaagcggtttcccagtgtcgcatctgtgtacttctctatgagcatcgttacaatctcttcaagcttcattccatacctctgaaatgactctaa

SEQ ID NO: 213 - DNA, 356 bp, Glycine max
  Clone ID: ASG32442DA-01-Q1-E1-C12
agggaaagtatatagctacttcagcgaaaatcaaatgcaaaagaacttcaaaacggtaatacacaatctgaaagccctactaagaaacctattatacaaagaatgaagtacaaaaacaagtatgatcattaaaaaaaaaacaccctgctcgtacaattttctatttggtaagggttgtgttacctcagtgttgccggaatccagtactctttgcatacacataataacagtttaattacataacaagtgggatgcaacacaatcaaacaaaggaatgatacatacaacggcaacagaagcagcaaaggccaaagttgcagcactagcacccaactaatgattcgaccgcatcagat

SEQ ID NO: 214 - DNA, 346 bp, Glycine max
  unsure (1)..(346): unsure at all n locations
  Clone ID: ASG32442DA-01-Q1-E1-C2
agcaagaacaagctaactttattagtgtggatatcataaacattttcactctcatcgataacagcactacacgcatacattgacatcttgccatcgatagcaacactcacatgcatacatgacatagtaattaacaccatgaacatgcccttctacccaactctaacctacttgcacagtacttagtgaaatacaanatggccttacacactaacacacacgagtgacatcggaagattaaaaaacacagcgtcttaatcctcgcatccccatgaacctgctgtggtcttgatcggttcattgaaccaatcaagcaacccattttaagaanaacaccttaatttat

SEQ ID NO: 215 - DNA, 366 bp, Glycine max
  Clone ID: ASG32442DA-01-Q1-E1-C3
tttttcggtgtcaagttcaagtaaacttctcattgatataataataagcaatacatatcaaatcattattcttgcacatgcaataagcagatcgcatttcacattatccaaggaacacatctagttgtagcactcgaagcacactaatataatggaaatggctggctagctagttttacttggggcaaccaggccattggacatccgggggagaaagtgttttaagaaccggattcctctcgaagaaattggttggcctgagctcgaatgcagtgctcaataatggcattatggggaagtcttcctgtgctggaacatgatgaatttccacaacgttgcacagcacaatgtccttgttgttaatgt

SEQ ID NO: 216 - DNA, 171 bp, Glycine max
  Clone ID: ASG32442DA-01-Q1-E1-C4
ggataatgtgatatcttattagtgatagcatactctctttttttattgtggtagaatcaaaaacacaccaaaaaatataaacgggaaattaaccaagatgaaaaagagttgaaaaagaaaaaatgtacctttaaatgaagactcaaaaaagacctcgaaatgggaaatttg

SEQ ID NO: 217 - DNA, 312 bp, Glycine max
  Clone ID: ASG32442DA-01-Q1-E1-C5
aaacaacgatcctcatcaattcatacaacaatcccaagaacaagtcaatgttttttgactgctccacattttaaacttgttgaaagccattcatccacattgcaatttgataccaccttgacaactcagacgccttaagcctcctcctcctcttcatcctcatactcttcctcgtcaacagtagcatcctggtattgcgggtaatctgccaccagatcattcatgttaccctcggcctcggtgaaccccatttcgtcaaatccctcaccggtgtaccaatgcaagaaagccttgcgcctgaacatcgccgtg

SEQ ID NO: 218 - DNA, 393 bp, Glycine max
  Clone ID: ASG32442DA-01-Q1-E1-C6
taactattacaaacatccatgacttgatctctcaagaacataagcattgtcaacaaaacccagtttatacaatgtcaacaatcaacgataagcatacacattaacgagtcaatctaatttgactgcaccacaatttaaacttacaccactcgttcaaagccaaccatatcgatatttgaaacaatttttgacaaataagagaggcgccttaagcagcaatctcttcttcctcttcctcctcctcatactcgtcctcgtcagcagtagcatcctggtactgctgatactcagcaacaagatcgttcatgttactctcggcctcggtgaattccatttcatccattccttccccggtgtaccagtgcaagaaagccttgcgcctgaacataggcg

SEQ ID NO: 219 - DNA, 381 bp, Glycine max
  Clone ID: ASG32442DA-01-Q1-E1-C7
gatataactagttaagaaaatttccaatagaaacatggaggattgtttatatatagaacgacaatttacttcctacttatattctaggttaaacctcaaaatgttttgtcatcatccaccttgatctggtggatgcttcatagtttacacctagaagtacaatcctcaactttgcaatgaaaatcaggtgaaatatgttaacatctaaacatccaattgcaaagtattacaaaatctttgaaagggtagtaagtagtaactttttctcttgcatttggtggttctctccacttcaaccccttccttctcgattaaaagaagcacagaacaggaaacacattggcaagaatggatgcttatgagaccttaaaaatcttctga

SEQ ID NO: 220 - DNA, 296 bp, Glycine max
  Clone ID: ASG32442DA-01-Q1-E1-C8
tttttttttttttttttttttttttttttttttttttttttttttttttttttttttttttttttttttttccgcaaacaaacaaaccattatttgtaaaccaacaggtacaaacatccaaaataggcaaatgaatgacccccaaaatgttttgttcggccccaataccaagcaatcataacctactaaattggtaagatttgtaattttagcaaggtgccgaaaaaaaaacccatttatacatttccaccctaaagggaaagccaaccacaacttataaaaacacttccttgact

SEQ ID NO: 221 - DNA, 260 bp, Glycine max
  Clone ID: ASG32442DA-01-Q1-E1-C9
atatcacaccgcgtatttattcacacatgtcaatctttattcgctcaattgcgagtgattattgttcatgatcagggagatcgaagcacgctgcagcaacaaggaccacaacacaccgacacatgtgttaggtaccccattgtcccccaccaccggtcaagtagctcgcatctctcactgtagcattgaccagcgtcgcctgcaatgcatccataatttctatcccaaggaaaccctccacatgaaagaccggcatcagc

SEQ ID NO: 222 - DNA, 347 bp, Glycine max
  Clone ID: ASG32442DA-01-Q1-E1-D1
caagttcaagtaaacttcgcattgatataataataagcaatacatatcaaatcattattcttgcacatgcaataagcagatcgcatttcacattatccaaggaacacatctagttgtagcactcgaagcacactaatataatggaaatggctggctagctagttttacttggggcaaccaggccattggacatccgggggagaaagtgttttaagaaccggattcctctcgaagaaattggttggcctgagctcgaatgcagtgctcaataatggcattatggggaagtcttcctgtgctggaacatgatgaattcccacaacgtgccacagcacaatgtccttgtt

SEQ ID NO: 223 - DNA, 214 bp, Glycine max
  Clone ID: ASG32442DA-01-Q1-E1-D10
caatcataagcatttggctaaagtttactatcgaacttcgaacccatggctatactacatagacactaatttatgatgattttacagttaagatgccgacaaacacaactgattccacatttagtaattcaaacatatgagcggtgttacatcttgtgaggaatcctaaattgcaaagttgtagcacccgttttatgttagcaagtctccgatc

SEQ ID NO: 224 - DNA, 307 bp, Glycine max
  Clone ID: ASG32442DA-01-Q1-E1-D11
aaaaagaaactagatgatcattaactagttcactacaatagactctcatctggattttaaatttggcaaaccccaagaaaggatacaacgaacctacatggtaacttaataacgactaaccaagaaaaagtcatcgtcatcaataacctcaacatctttatttccaacaaaatgctctcgaccaatttccttcaccaaattggcaaactctatccttttgtccacagggagaggtacaaacggtagcctaaaaacgggtctgacaactccaagttgagcaagatcaatgttcaaaccaatggggttt

SEQ ID NO: 225 - DNA, 300 bp, Glycine max
  Clone ID: ASG32442DA-01-Q1-E1-D12
gaacatagatgtaactttttttcacttggcaaatgggcaatgagtgtgggaaagtaccaaagacaccgcatatttgcaggggaagggactagagtggggtccagcaggtaagaaaaactgaataaaggagtcagggttacggtgctgacactgcaaataattgcacgcacgaataagccaccgacacacacacccccaaacctgctctctgcatctgcatctgttcccccaaaccataaataaataacactttccctcagtcaccacaatttcattttctttgtaaacatacccaccacc

SEQ ID NO: 226 - DNA, 389 bp, Glycine max
  Clone ID: ASG32442DA-01-Q1-E1-D2
atattatcagctatatagtactttaaacgtgcacatgcacgtgtctcaagttaacaggtattaatatgatcttatttattctacggagcagtatacaaccaatatatgcgatgtactctaatagaaaaaaatcttgacaaaggcattccgagtgacctaatccaacatattgtaataatggattatctggtttacatctccatttttagattgctagcttcaactagacctgtaaatggctgagggggaaaagatgctgttcgcccttgatcaaaagcaacgttgtaaaggctttggaaatcaccaccttcccaatttgaggagggtagaatttgagcgaaacaggaagagtcaagaaaagtttcgggcaaaggtacagtgctagtact

SEQ ID NO: 227 - DNA, 385 bp, Glycine max
  Clone ID: ASG32442DA-01-Q1-E1-D3
ggtataactaagtttattaccatgcaaaagtttccactacaatggcagtatttagcgtgggaaagataccttcatatttagcgcggatctacaattaaccttttagttttacacaaaaacaagttacaatactacaatttctcaagcgtttacagtacatgttgtaaactaaagaataatctaggaagtatgtaactccctgtaatcaaatttctcttcttccttgcctgctgaagctccaagtgtttgccctggaggaggaccataggcacaactaattgcaagaaagtagaggtagttaattagacctatgcaagtgagcagtgcataatagtaattcagatgtgccctgttaatgttggttgctaaccagctctcctcccct

SEQ ID NO: 228 - DNA, 361 bp, Glycine max
  Clone ID: ASG32442DA-01-Q1-E1-D4
aagtccagcaaccaaatatccacttccaaagtatagtcagtatcaatagtctactgcagataagctcattttcaatgaccactctgcactaacaacatacacccactgatgacatttacataaaaaaaaaaaacctgcataacatctagtctacctgctttttctaaactttccattgaaacatggaaaagttggacagaagagggttttccctctttgccgtgttcttttttaccccccaatttgtcagcattatcacctgcattttacaaaagaatcatagacatagagataccagtgtgacaacatatatcagattctctgcctgacccttctaccattcgtgtcaccaccatctgaa

SEQ ID NO: 229 - DNA, 405 bp, Glycine max
  Clone ID: ASG32442DA-01-Q1-E1-D5
gaaaagataatttattccattctctggcatgccattatttatttgatatcaacgatgacttgattacattgatccgaatcgaagagcaagtgatacacactgcatgtctgtgatatccaggaaacaaacaagaagaaaaactgggcatgcatgccaaaggaacaatagatttagatcacttgagaaggaattttttcagccaaaacgcagaggacttagggtatctactcaaattgttcttgtaatccacatatatgatgccaaatcgagctgtgtaaccagcatcccattcaaagctatctgaaaatgaccatatatagtagcccttcacattaactctatctttgatcgcatgaagcaaggatttgagatggccatcatggtatctaattcgaattacatcct

SEQ ID NO: 230 - DNA, 395 bp, Glycine max
  Clone ID: ASG32442DA-01-Q1-E1-D6
ttttgacaaaatgatggtgcaaaatttcttcgccaacttgcttgtctgcattgtgagttatacactaaataactagttcatggcacctcatttggttctttgctctctgaataaaaattacaacatataggcccaggttgctgccaatgttaattcagctggagcacactgtacagatacatgtgtgcttgtttcaaaagagtgaagttgtaagctcagtaacttccgctacaacttgatcataatctgactttaatttctcttgttccccttgctctagttcaccctttgcaggcgttgtctgtaccagaacacagcaagtatgcctctttgttgctcctgcgcctgcaagatcttctttaaatgggacataactatagtgaatgtcagactct

SEQ ID NO: 231 - DNA, 306 bp, Glycine max
  unsure (1)..(306): unsure at all n locations
  Clone ID: ASG32442DA-01-Q1-E1-D7
tagtataattaattaataatgataaataaatatatcaaacaagctgcactcaactgaatttatgaatattcctaatctaaaaatctgtaaatccccgaaaccaaaaatttcctctaaatctaattaacgacaacatttggagcacaggatcaagaaaacaatgagaaagacaatggaagacagcgcaatggcgacgccgagaacaaacttgttaggcccatgatgatgctccttcttgtgcctactcncctctccatcaccctcgtcgtaatcatcgtcgctgctatcatcggcagaagaatcctt

SEQ ID NO: 232 - DNA, 51 bp, Glycine max
  Clone ID: ASG32442DA-01-Q1-E1-D8
tgtgaacataatatgcacaatatttttcttttaatatactggcatgtaaat

SEQ ID NO: 233 - DNA, 355 bp, Glycine max
  Clone ID: ASG32442DA-01-Q1-E1-E11
tttctattttcattcgaattcattttatttatatattaatattatattcaaatgaaataaaaagatattaaaagatactaattataagaatttgaaagtgaaattataaagttattaaatgattaatcaatttttttctacctgttcctgtagtaaaaagagttccatctgttcttgaatagcttccttcaaaaggacttctgcttccccagtgaatgtcttggtagaagatatgatttctttgaattgaggtttattcgtgtttaagtaagcacgtaactcaacaagaaattttcttacctgtccaatttctaatgaatcaagataaccattcgttccagtataaatagttaat

SEQ ID NO: 234 - DNA, 381 bp, Glycine max
  Clone ID: ASG32442DA-01-Q1-E1-E2
ttatttttttttgataagtcccgagttaaactctactcacgtgctttaagtataataattggtggtcaaagtcaacattgtcagttccgaatgaggcacaccactatcatcaaaacatcgtccaagtcagcatgtttcatttcccccttcccgaatcagttttaatcaatttctgatgctgccataataaactttatcgggtaatctaacatctgcgtgtctgcatttcaacacaaaataagggaacccttcacagcacaatcacggggtctaaatcacatgagcactatctccacaacatacaagcagaagacacatggaaaaagggaaaggagatttctatacaatgaggccgtgcaaaaatatacatgcacaagccac

SEQ ID NO: 235 - DNA, 235 bp, Glycine max
  Clone ID: ASG32442DA-01-Q1-E1-E3
ggttatcaaacacagctttctttcatcccctttaacaaatttctcgatatgattttgttacacagattcctcgtaaggtgaggattaccacaactagaacagttctatgtttcccagcctaataatcttaaaatgggtatgtacttcaccaccaacactcacttccaaagattgagatacataatttaccagtccaacaaacccatgttgactcaagcgaacacacatagggacc

SEQ ID NO: 236 - DNA, 380 bp, Glycine max
  Clone ID: ASG32442DA-01-Q1-E1-E4
aaaaaaatgataaaatggaattacaatgatgggaatataaaagtttagtgtaaataggtgaacacaattttacgggagatagaattatggatgaagaatacaaacctaaacttagagaagttattttaacacttgatgataagaagcaacatggcatgtttatataaacttggaaacctatgacaaaattgtgatcccagaatttccaggacatacgcaaaatactgtttaaatctttggagctgtactagtcagccattcttccaaacttcatcttcccttcatccaagaagtcaacctgcttccttttcttggaaaatttcatagcactttgaaatccattctgttcatcactaaattgggcagctgttcgagcccgc

SEQ ID NO: 237 - DNA, 317 bp, Glycine max
  Clone ID: ASG32442DA-01-Q1-E1-E5
ttaataattttaaaagaattttataaattaaaattgaccgtgtttttcactggcattataaataagggatcctgaagcattgtatccaagacatgctcaagcagattccgatgccaatttaaaaatgctaatgccatttctaacatagtcgataaactcaatacagagataacaacagaagacccaaatggtcaaataagaaactaactaaacaacctgagcaattaaatccatacatgcttacacacacactttattccgagaaaactatcaacatgacagtgtgcatttgaccaaaaacatacagcatatactac

SEQ ID NO: 238 - DNA, 395 bp, Glycine max
  Clone ID: ASG32442DA-01-Q1-E1-E6
tttttccaaagaaattaacaaagctccatgctttggaaaataacgctaataattcacaagtggatacacagttcagtaagggggggcctccacaacataaattggttgtcgcttccaacacaccttttttccctctcgggttataaattgaggaaaagcataaaagaggaaaaaaaatataaaatgagaaaagagtaaacctatatactttaattggcatctcctagcttattgaaatggaacatttatatatctcgtttgagatcactgatgcatgtacatgcctatcccttgttgttctatatgccttcacgggccacaccctacaaacttgaacgcatttcaacaagggtatcaaagctgttttgcacaattattgataaaagatggtgcaa

SEQ ID NO: 239 - DNA, 400 bp, Glycine max
  unsure (1)..(400): unsure at all n locations
  Clone ID: ASG32442DA-01-Q1-E1-E7
tttacaaaatctgaaccacatatatattgcaggattccatttatgtttgacactcaatcaattctaggggcttcaaaaacccaccaaagtgtgccaaagtggttcattttattcaacanaggaagacaataatggccagaaaacacaacaacatggaaccacanagcagtacactgcacactatatagtaactctgccacaagtacacacacacaaacacaaaggagtatgtcaagcatcatcatgtcctaaaagcgccacaagcattttctcatagtcaccggtggtgtccttaacaatagcacgttcaagagggacactgctcctcctttgatactcatctgctatgtttttcaaatcaacctcagcccttgtggccaccactcttgtaagggctcct

SEQ ID NO: 240 - DNA, 366 bp, Glycine max
  Clone ID: ASG32442DA-01-Q1-E1-E8
ttataattctttttatgcagacatcgccaataactcatctaatcaatttcaacttcacaatatatatatgtcattgatacaatggttacatggatcactcagcatcctgcttctaactgcacattccatatcatgatttctagacatacacattagccataaggatattttacatatagtacatgcctattctctagaggaatcagctgaaaataccgcaataaaccacacatacagtgaaacacatcggttttgcaacatacatacatatcacgcatgatatctcttcaagcctgtagaatatctggattgattcccatttgtaatcatgttttactaatgtacacacctctacacgtgatgaat

SEQ ID NO: 241 - DNA, 330 bp, Glycine max
  Clone ID: ASG32442DA-01-Q1-E1-E9
tgatgcaaaaactgattccaaatacttcaatgagacttgagtccataatttaaaatcatgtttctaacgcagattcaaacatcttggtgaatgcaaaaaccatgtttgacccatcctaaactcaagtcatgccttcgaaactgctcataattatctgttgcatataaaatagtattacagtctaaattaaaaattttaaccaaccaaatatctaggaagtccaacatcaagaagggctacattattgatatttaaatagcatcctgatattagcctttgccagccttgttaccctcaattcatgatgacttggtagattccctaaccaaa

SEQ ID NO: 242 - DNA, 294 bp, Glycine max
  Clone ID: ASG32442DA-01-Q1-E1-F1
ttaagattcttttgatgttgatatgtggctagctagtttcaatagtgtctatttcctactagcttattcccagtaagcccacaagttagtgcatctcttgggatttttccaactttgtgaacaccctcagcaaaaatcacacccattcccatgtgcaaatggggttcaatgtgacaatggaaggcccaaactcctgagttatcagccttagacctcagagcagtccaaccatatggaaatatcacagcagtgttcctcaacggtgcatgtgtcaaattgaaattcctctcatca

SEQ ID NO: 243 - DNA, 344 bp, Glycine max
  Clone ID: ASG32442DA-01-Q1-E1-F10
aatcaaacgcttaaccgataaaattgaataaataggccccaaaacaaccacagaaccaaaataaagcttagcaacaagccaaaaaagtcatcaactaaaggttaaacaacaaagcaacttaaccggtcaccggtatataatacccaataccatttggaaatgtacattatttcaaaccaagggaactttcgcaagtcaaaattacatttagcgcttagcccattccaaccacaaagtacatcacgcaaaaacaacaccttgttgcgttaagttgtaatagacttcgagacccatgccgtcaaggatcccctaacccttgaaaagcaatggatccctggaaaagg

SEQ ID NO: 244 - DNA, 331 bp, Glycine max
  Clone ID: ASG32442DA-01-Q1-E1-F11
aaaatcagaaacgaataatttttattcagcagttaccataagcgttttgttcgttcctctgtcagcaaattgaaaaaacaagaaagccatgtacaataacaaacacaaattaaataactgtctatgtgggaacaacctggggttctagaggtgaagacccaccaccttcctcaggcgtatctacggtgctttccacgaccttttcctcttcctctataaaaccctgcttaaatctatcataattggtgagttcagtagccttgaacggccgctcgcccaaaactcgaagcaagtcgtcctggtgaagtacttccttttcaagcagcaactc

SEQ ID NO: 245 - DNA, 332 bp, Glycine max
  Clone ID: ASG32442DA-01-Q1-E1-F12
ggtacaaaaaatgaaatgagtcgaattaaaccaaaatatggacatacatcaatgttattcataggcaatacacacacatagcattggaatcattcatataacttgtacaacaataggaagagtatatatagcttcgtttgtttttattttatttttaattttcctatactagtagtgcagccaaacaaagataacaactgccccatatagataactagtgatggaagcgatttctgttcaacatcgtgatgaactcctctgcactaacttctcgatcattaccttggtctgcttcatcatacatctcctgaatctctctgtccgtgaaattt

SEQ ID NO: 246 - DNA, 382 bp, Glycine max
  Clone ID: ASG32442DA-01-Q1-E1-F2
tttttaaaccataaacagtttataaaacttcgttataaattaaatgcaacttaaaacatccctcatcagcaaaggaaatggactaaaaccctatagctgcttgtgaaattcgaaatatctcagactcttcttaccatcaaaacaaaaaacagtactcatcaaaaacaaacagcaatgaaaattgaccaccgccgatcaagaacctagttttgaaagttacggctacatgaaatcggcagaaacttaaaaatataacttaaacaaaacacctaagactctgcaaggataaaactactataaaggagtaaccacgatgatgatcacatgtgctagcaaaattgcccaaatgcaatcacttcttcttggcagcggccttggtgac

SEQ ID NO: 247 - DNA, 244 bp, Glycine max
  Clone ID: ASG32442DA-01-Q1-E1-F3
aaaaaaatacctgagtcataataaataatcgggttcaatccaaaatttcagacattttaatacaatcttaagaacctcgcataccttataaccaagctacaagtttaaaataagactacagtttacatgagagcaataaaatccatcctacttcaacacacagttttattacgccccgttacgaaaccccttgaattgcaattgcaggttgcatggctatatcctgagtctgtctcacagaaaa

SEQ ID NO: 248 - DNA, 394 bp, Glycine max
  Clone ID: ASG32442DA-01-Q1-E1-F4
ttttaaaaaaaaagaactttcaaaaccttatagtaacaaaaatagacaaccgtaatacaaggtacaggatttgcagtgtgtattggggtgcagcaatttcctttggcataacaaaaaggaaagagaaagtacatttaaaaagaatatggattcagacattcacaaccaaacaacacattgcaactagcaaggaatttggacaatcaatcaatagtcctatactgcatagcaatgttattgacacaagtatgcaagcatattacaactcatgcagatgcaggtaacgagatactgtttctctggctaccagcgcttggttttatctcccatgatgatagcacatgctgctcttcctcaagattgatgaaaggcaaagaaatctcacggatcatca

SEQ ID NO: 249 - DNA, 306 bp, Glycine max
  Clone ID: ASG32442DA-01-Q1-E1-F6
ttttattttttttttatttttttattttattatttttatggattttaaattattgtttaagagccaaaaagtggattcccgtgcaataaatgccagtcaaatgcaaaaaatcaaagagacggcgtatgaacccaatatatgcaacccatcaacgggaacaacaaaaatggcttcatgacaacagaatatagacaagtaaaaatgagaattatacgataaaacaatgtgaaggacacatacttggaatcaaattgcaaaagaggatcactcaggaaagtggatactggcactcaagaaaccaaaaga

SEQ ID NO: 250 - DNA, 360 bp, Glycine max
  Clone ID: ASG32442DA-01-Q1-E1-F7
taagttacaatctaatatagatttacatcggatcgtgttttctcccctactacatttgcaaaaattggccctagaaagttgaagctcactgcacatatccctataacacatccaccacaaaaattggggaggaaaaaaagtaaaacctgtatagggcgaatattggcgccctctatcaataagttaatataactattataagtaaaaaatgataagaggatcaaccccccaacccagaatcctctgcagaatgaaaaatgaactgtaagaggttgagaaggaaaggtaaaaagagaattactgctggtgaatgttacacataagcaacaattaccatgctctaagcccgaaaagcctact

SEQ ID NO: 251 - DNA, 346 bp, Glycine max
  Clone ID: ASG32442DA-01-Q1-E1-F8
ataaaacttcgttataaattaaatgcaacttaaaacatccctcagcagcaaaggaaatggactaaaaccctatagctgcttgtgaaattcgaaatatctcagactcttcttaccatcaaaacaaaaaacagtactcatcaaaaacaaacagcaatgaaaattgaccaccgccgatcaagaacctagttttgaaagttacggctacatgaaatcggcagaaacttaaaaatataacttaaacaaaacacctaagactctgcaaggataaaactactataaaggagtaaccacgatgatgatcacatgtgctagcaaaattgcccaaatgcaatcacttcttcttggc

SEQ ID NO: 252 - DNA, 354 bp, Glycine max
  Clone ID: ASG32442DA-01-Q1-E1-F9
ccagaaaccgtttgatcagttatagtatttacagtatcagaatccaatcgaatacttaacagactaaaaacattacaaaaaaaaatgcatttcctctaaaaattcaaacgaatacttagcaaactaaaaacatcacaaaaatcgaaaaatcccactgtggtaaaaaaaagttgcagtctcgtcattgtttccgaatacaacagaaaaattgcagacaaatgcagctgatgtgacgtcaattgcaatcacgttttttcttaaaaccttactgcgaatctgcgattgcggtctcatcaccgcagcctttgatatcgtagaaaattgcagaaaaatgttgaggacagcgcagcatca

SEQ ID NO: 253 - DNA, 219 bp, Glycine max
  Clone ID: ASG32442DA-01-Q1-E1-G1
tttatttttaaaccaaaaaatggctggatttttgaattacaacagggttaacagaaaaatttacccaaacttcaagcttaaaaggcatgacaggtgaaacaaccacttaaggaacccatctgacgggctcaactaaaaaatatacccttgtgaggatttctggaaacatgatgaggctgtttggcaaacgctgaacttcacatttccagattttttttc

SEQ ID NO: 254 - DNA, 73 bp, Glycine max
  Clone ID: ASG32442DA-01-Q1-E1-G10
aaaccacaaaccggatagaggtgttgctgcaaacttaacattgtgcgattacgcataatgtatatggttaaaa

SEQ ID NO: 255 - DNA, 327 bp, Glycine max
  unsure (1)..(327): unsure at all n locations
  Clone ID: ASG32442DA-01-Q1-E1-G11
cacaccatcaccaagagtgaattagcataaactaggaaaaaaaaatgtaattaggtaatgagatactgaatcactggtagaaaagaaaatcttcagttgtcaatatgcggtaaaagaaaatttaagtgattctacactactcgacgtgccatgaagctaattgaacgaattaaaaaaatggtgtgggatataaatttaacagtcaagagagaggagcaccaagatcctcgtctaccttaccctcttgaaatctcttgagaaggtgtanctgatgtctcaagtgcaaaacctcttcctgaagcaaagtaggaagattttcaattgaaa

SEQ ID NO: 256 - DNA, 339 bp, Glycine max
  Clone ID: ASG32442DA-01-Q1-E1-G12
tagcgttcacagtatcttgtgagcataaagcataacttttacctttggtgtatgaaaaaatgtcatttacatagaatgaaaccttaacagcacttattaagattaaatatactatctaactaattatatacaggtgttgcggcaagcctaagctggtaacattaggcgtcacgtgtagggagaaaattttagctcatacataatttaagaatacagcactgaacttgcgttcaagctttgcaaggcagtaatattcccaaatagcgttattccttttggaagaaagagagaacaatatctgtatgaacagagaagagctgtgtatccacgaaaagcttc

SEQ ID NO: 257 - DNA, 296 bp, Glycine max
  Clone ID: ASG32442DA-01-Q1-E1-G2
aaaatctccttatttaatttttgtgttctaaatatatctcacgattagtcaaagggtagtgggtaagaaatcccccagctgcggtttgaaaatttttttttttccaaaaaaactccggaggagaaaacaaagagtattctttagaaaaaaacgcaataagaaatgataccaacggtttttttacaaaactggcagagataaagatagatcaaaacagcagaaacgtaaatccctaaatatgtaaaactccgagaaaactgtgaggatccagctactccaaaggaatatgtattatg

SEQ ID NO: 258 - DNA, 368 bp, Glycine max
  Clone ID: ASG32442DA-01-Q1-E1-G3
tatttttttttttgattcaagaaccatatcaaagttggctttgaattgatggtattaaaaagcatatttgagaaaaaaaattacgagaaactgttggccatgatcccgaggctatactaccaaggcacgcctctggaaaatggaattacatagtcacaaattattgaacatgcttttccaaattagacagtctaattcaaaaaaaatggtaagtaccagagcgatcaatcaaccaaattacgaaatcactcctctgcgtaacgcaacgaaataaaaatattttcagcatatgcatgttgaaattcaacttaactgactttttgcaatgcaacacaagatcataaaacgtcaaaactcgagaacaaatg

SEQ ID NO: 259 - DNA, 400 bp, Glycine max
  unsure (1)..(400): unsure at all n locations
  Clone ID: ASG32442DA-01-Q1-E1-G4
ttatagaataaaattagggacatattacactttatttcaaatataaatggctgcaatgataagcatatgaagctcattaaagttatgtgaaatttctcttacatgcccttttcaagggaatgggcggatctgtgaaagccccagaagagattaaatcaaagacaaccttgttagctgcttcagtgtagtgggttccatcccataccactctaacagatggtctttcgcatgaacccacaacaatatttgtgccattgacctgtatggttcctccacatccaacactctggctgaagttgtacgtcnctccatagccacaacaagcaacatgcgggagttcaaagccatatttccttgggtttttgaatagcaagtacttagcagagtagatatctacata

SEQ ID NO: 260 - DNA, 78 bp, Glycine max
  Clone ID: ASG32442DA-01-Q1-E1-G5
actccgtctaattgaaacttcgattaccatatgcaatccattcaatcaaattttgttttggcatgtttcccaatcaaa

SEQ ID NO: 261 - DNA, 92 bp, Glycine max
  Clone ID: ASG32442DA-01-Q1-E1-G6
gtgtattattttattttttttcttttttttttttttgaaaaaaaccacgactaaaaaacaccaggggaaaaacccaaagtgctccaaaaaca

SEQ ID NO: 262 - DNA, 397 bp, Glycine max
  Clone ID: ASG32442DA-01-Q1-E1-G7
tttaattaaagcatatatatatttttatttttccaacttttagtccaacatagccgaagttattcaaaatctataatacttcacaccctatttattcataggatacattgatatggagcacgattttcttcgactgtattatacaattacttgattttcatttaatcactatacttggtagcacttgctttaggttcaaaatcgtacttggtatttgacctggatgcaaagtcatcatacttgctaatatttggtctcggttcaaaatcatcgtttttggtaatgcttgatttgagttctaaatcatcatatttggtaacacttggtctcgattcaaaatcatcattctcggtaacgcttgacctgagttcaaagtcatcatacttgctaatatttg

SEQ ID NO: 263 - DNA, 394 bp, Glycine max
  Clone ID: ASG32442DA-01-Q1-E1-G8
attcagaaaacataatattgctcatttactttttaaggaaaaacaatgaatgcaggatcgttcacctgatcctaagaaagagaaacagaatttcatgtttattgaccattattcttccctatagcgtgcgtttatgaatcttcatgcccaccccactgctttattctatcttccgcaagggatgcctctttattccaatctgttctatagacaaggaagaatagaacacaagtttgtaagatagttcctgacagcattccagaccaaatcaccatgacacccatgtcaagcttgtatcccaaaacaaggcccaaaggaataccaaataggtagtaacaagcaatgttcacataagcaaccaaagcctgccaccctgcgccaacagcaacccctg

SEQ ID NO: 264 - DNA, 371 bp, Glycine max
  Clone ID: ASG32442DA-01-Q1-E1-G9
caatttctttgacacaaaatacatagctgcagccccaccatactttgccactaatctctcagaaaaactgaaatttccttgggtggtgatgtaatcaaatgattcaagagcttcaggaacattccgatatatattcggtgacaagacatgcaccaagtgattatccacccactgtcgccacttcttctcttcttcagcatttaggtcataatctggatgtatccttttgatcaacttatcaattatgtctgaagagtcaacaatttgttcaccatcaacggtgaggataggcaccttcttgtagtcggaccatttgatctccttcctgtttatgggattcacctcaaacactttgaatggaatatcataat

SEQ ID NO: 265 - DNA, 263 bp, Glycine max
  Clone ID: ASG32442DA-01-Q1-E1-H1
ccagaattagtgttctgcattcagtcacaacactatttaactatgatgttcttaccgaacagtacaattctctctcacaaatcaagcacagctctaaccttaagaaaaaatcatgccgtgacaataaccttatacacaaatcactatcattacatacatgtaatatataccaaaaaaaactaaagaaaaataatgcaatatcaaaatataatgtaagtagtaatactagtagtagtacttaaggattcggctctgcacagctc

SEQ ID NO: 266 - DNA, 296 bp, Glycine max
  Clone ID: ASG32442DA-01-Q1-E1-H10
gaacactacaaatagaaagttgacatttaataaaccaaagcaacacatcgcagcaaagtcctgaaactcgctgcgcttaacaaaaatgtaatcaggggttccgacaaacacaacacattaaaacacaggtaactaaaagcaattttgccaccgtcgatcaagaacccagttctgggaacaacagttgcgagatgatggtggagacttcaaactttgtccgaaaaacaagctacctagaaaagaagacacaagagtacagaaaagaaaccaacatttattgtaaccaacatcccctg

SEQ ID NO: 267 - DNA, 361 bp, Glycine max
  Clone ID: ASG32442DA-01-Q1-E1-H11
tgaatattgaatgtttaagttattgtatataatatttttatacgaactagggcaatttcacagcttttttttaggaaaacaaaatcctaggaggcatagacaataagagtttcaaaactgttgaaggaaataatggacagacaaagatacatacagctaatgcttgtaacatttccttgagaaatgaaagggaaccaaaagaaagggaagaaagaaaacaaaaagctatgtacacttcagtttcgatgttttctggtttccagagttgttgcatctttaagactttcctctgcatcatggtccatcccgaggctgaagaaggccactgcttgaagatagaatgcaattgggcatgtggggg

SEQ ID NO: 268 - DNA, 340 bp, Glycine max
  Clone ID: ASG32442DA-01-Q1-E1-H12
tgtttattgtatgatcatgttattgtttatatattttgaacactacaaatagaaagttgacatttaataaaccaaagcaacacaacgcagcaaggtcctgaaactcgctgcgcttaacaaaaatgtaatcaggggttccgacaaacacaacacattaaaacacaggtaaataaaagcaattttgccaccgtcgatcaagaacccagttctgggaacaacagttgccaaatgaaggtggagacttcaaactttgtccgaaaaacaagctacctagaaaagaagacacaagagtacagaaaagaaaccaacatttattgtaaccaacatcccctgatgaaac

SEQ ID NO: 269 - DNA, 361 bp, Glycine max
  Clone ID: ASG32442DA-01-Q1-E1-H2
acctgaaaataatgacaattttatcacatttatgcagccataatgtcttgtcattttcataacccacatctaacatacatcctgcagtgaaccagtttttcatcaattcttcaagcaagcattgacaaatacagtgtgttaccctttcttttacaaattcaagcggcactctacaccatgtagcatttataatacgggagtctaatgattcaatcgctagcctgtgacggagtcacctgattcaatcgctaccccgctcatttgcaatacatgttgaaccacatcgcaatgtgaaagtcgccttcaaggtcaggattgtggcctttcaattccatgaacagcatttggaagaacaatgact

SEQ ID NO: 270 - DNA, 289 bp, Glycine max
  Clone ID: ASG32442DA-01-Q1-E1-H3
tttaggaacgaaaaatccatttttctcctttttattgaataacgataatcacaaagtcatacacataatcatgtgaatacgataaccaccgtgcacttgtgattttctcacaacagtaactttaagtacacaagacagagtccaagtgatccaaccattaggcaataatgaaccccttaattagttcgaagctttgacggttccttccttggggtgatgcacgactatgtaattagagggcatcaaagtgagaaaatcatcaagtgttagggacgtgcattggcgagtg

SEQ ID NO: 271 - DNA, 82 bp, Glycine max
  Clone ID: ASG32442DA-01-Q1-E1-H4
ggagagaaaaaaaaataagatacattaattgcactgtacggatttgcattaatacaaagtttcggaagggatcttcaactaa

SEQ ID NO: 272 - DNA, 228 bp, Glycine max
  Clone ID: ASG32442DA-01-Q1-E1-H5
tcctgacagaaagctcaatttattcccatcattactgctttgcaatcaatacaaagactattttaccattaagtacttactaggcaatgatactcacactcatcctttcttcatacatctttacgcaaaaaaaaatcatgccgtgacaaaattcttatttccaaggctcaaactttaaacccatgtgtgagaaggcactgcatgatgctttatcatgttgcgattggc

SEQ ID NO: 273 - DNA, 294 bp, Glycine max
  Clone ID: ASG32442DA-01-Q1-E1-H6
ttcaacataaaataaaatttaatacaaaaatggtatgtaattacagtatgagaccaaaatgacagaaaatttgtttttgttatcttcggtgtaatcgctctccaactatagattcacgatgcttccatcctttttgtattgaaatcattactctacaacattcatcgagtttacatacatgcactctttattatttttgtaattagttgagaaatcgatttcattggcagacttgtccaaaagatccaaacatgctacaggcgacttccaccaacttccctcatcttggattat

SEQ ID NO: 274 - DNA, 233 bp, Glycine max
  Clone ID: ASG32442DA-01-Q1-E1-H7
ttatttaaaaataaaggcttttcccagctatttttcactttctaaaccatcaatcatccaacataaacaatattgtcaacctataacaaaaacacttaattcaaaatcttcattgcataaataaccgaataagtaaattgtcagacagaacaaacaacttctgggagaagggaacttctattaactccaatgacagccaaaactgcaaaaactagagcacatataatttatat

SEQ ID NO: 275 - DNA, 316 bp, Glycine max
  unsure (1)..(316): unsure at all n locations
  Clone ID: ASG32442DA-01-Q1-E1-H8
tggtagcggaaaattttgcacagcttaaataatgtggattatttattagtagaaatttcacttagaatacaaacgactttagtgaggctgcgacaaggaagaccaagaagcctttaaagtttcagcgcatcacaacagtaatagtaaccaagtatgaacgacatgttcgttggctaattggcacgtgccgggcacanatactgatctacacagaatgatgatgaatgacgatttatacaataggaagctacacattacaggtgtttgatttaataacagacgaatcccttgggaaacacctttccacagtagttta

SEQ ID NO: 276 - DNA, 92 bp, Glycine max
  Clone ID: ASG32442DA-01-Q1-E1-H9
tttttataatgtcatctgccctttcattcatgtatttctctttactgcatagtaccaattgttgaacaaaccctaaatcttgaaacttacgc

SEQ ID NO: 277 - DNA, 316 bp, Glycine max
  Clone ID: ASG32442DA-02-Q1-E1-A1
gtaaaattgtaacatgtatacgcattcggtataataggaaaattatcttatagtcatggtgcactgaaaatttgttacccattggaaattacctctccaattacaaaggtaatcatcgaaatctaaatgcttgaagaacgaacaacaggttacatcaaggggcgaacattacgatcagcacacccttgctaagagaatatccaaaacaatcattggggtcaggtttaaaaaacatgaggggctaaaatcacgacagtactcattaggtgcctctgattttgacccagagaacccaatagcttagcgctcaaactga

SEQ ID NO: 278 - DNA, 404 bp, Glycine max
  Clone ID: ASG32442DA-02-Q1-E1-A11
ttttacaaacttccttcattttattaccatcggaaagattaaaacagacattgacagtcaatgttatttagcatgaaggtgtacatcaaacaactgtagcatcctcaagccatgctctacaatgtatgatgagacaatctaccggtttttctggttttgctatgatgtaccaccatactcgaatacctaaacaatagacaacacaacatgagctgtaggtacttacaaggtgtaaggttacaaatttacaagcagtcaaggtacatgtaatttctgcgtcgattgaactgtagaaggcttccataggtgcgatcccaaacaccaataaagagtgattctgtgtcagggctgaaggatacaccagagatctccccaaaaaaatcgatctcctgctccttctcaaa

SEQ ID NO: 279 - DNA, 279 bp, Glycine max
  Clone ID: ASG32442DA-02-Q1-E1-A12
ggaggtgaaggtgttacaggagttgtaggtgaaggaaatggtgaaggtgtaccaggtgacggaggggaatgtgaaggtgaaggtgttaccggtgttgtaggtgaaggaaatggtgaaggtgtaccacgtgacggaggggaatgttaaggtgaaggtgttaccggtgttgtaggtgtaacaagtgacggaggggaatgtcagggtgaaggggttaccggtgttgtaagtgaaggaaatggtgaaggtgtaccaggtgatggaggggaatgttagggtgaa

SEQ ID NO: 280 - DNA, 310 bp, Glycine max
  Clone ID: ASG32442DA-02-Q1-E1-A2
gcgttgcgagatataatcaaactggatataacgttaatcgcacatctacacatcgtccacagtcaatgtgaaagggcatcacgtaccgaagcactttctcattgaaactgcaaccagatttaaacacttgcttctcatgtcagcgaatttcgtaactggagtctcctcgaacaggtacaacatgtgccgacattgtcatggtttggcaagcatatgcattgccggatgtttcgatgagaaccacacgcgcgagttaaatgacacactggtatgtttttacattcatgcaagcttcatggtcagcattatg

SEQ ID NO: 281 - DNA, 395 bp, Glycine max
  Clone ID: ASG32442DA-02-Q1-E1-A3
aactcaggagtcggccgttgctctttttttttttttaccacatgtcacaagatactttatacaatcaaaataaatgtaggtacactcaaccaaagtacacacagctaattgcactctttatgtcccgacagatatcaaataaaaaagagaatgctagttgcactattttttttatgtatttatgactggtgaatatatgagacatttaaaaataaaataggaagatcatggtctcgaattcttcacggaccattttagttaatagaaaaatttcttaaccaaatcaagtcagtcagcctcgatagatgctagaggtgctgactttacttgcatctgcttctccttgaccttcttaatctacaagtaattgcagttggatcaagacaaatccgata

SEQ ID NO: 282 - DNA, 320 bp, Glycine max
  Clone ID: ASG32442DA-02-Q1-E1-A4
ttaatggaaacgtgatttatttatttttctcttaaattgctatgcatggggatatgaatttagactcatttgcatgttggcaacacctacccaagcaggcaataattaagtagtattttgccagtgacatattttcactcctccttctcaaactctagcttgatgctcagagttgtgctggttagattctcaaatggtggtactaatgtcaccagattacgatcatcattttcggcatccatctcctccaacaaatccgttattcgcagtgtcaaactaggtttgatcttcatgaccatgttcatgtgtgaatggcaatg

SEQ ID NO: 283 - DNA, 401 bp, Glycine max
  Clone ID: ASG32442DA-02-Q1-E1-A5
gtacaattgtaacctacatacgcattcaagaaaagaacaacattatgtcattgtccaaacattcaaacgataataatacatttggtaatgcactagtctatgagaaggagaatgctaggtcagtggtcgatgccagcatctacttccatctcttatttaggtcccaacgtaactagcatctgaaagaaacctgtcagtatttaactaactcatttggctagtatttgaacaccacacggtgcaggagcatgcttcccatccttaaacacaaggtttcctctaacaaaagtctccaaaacttttccagataaccttcttcccatgtaagcagagagctcagaaagtttgatgaaaacaggataatcatcatccaggtcaaactccagctctgggtgccaaac

SEQ ID NO: 284 - DNA, 356 bp, Glycine max
  Clone ID: ASG32442DA-02-Q1-E1-A6
gaggtccgaaagatcactatcactatcgctgaacaatgttatttaacaaaagtatcaaccacaaatacaaacaacaacccaacttcccaatcatcgtcacgtccagcaaaatacattcagtagctatctaaaatctggggaacccacattggcattaaaaaccatgaccatacaattttttagagaaatattatgggcaccatgcctcttcaacaatcccctaaacgttgcttatgcatcagcaaacccaagctcggaaagcttatggtgagcctcagcgtaatcagcaaagaaagcatcttcgtccgctgcatatttatcaacgacagggcggaacacagggtcagacaaaagaa

SEQ ID NO: 285 - DNA, 318 bp, Glycine max
  Clone ID: ASG32442DA-02-Q1-E1-A7
aacccttaaaaaaaattccattgttaatgaatatgaataacaaaactagggcgtttcagcctcaatattttgaggtttgattattcacctagcgtatgagccaacgttgactgtttgattcactgaaaatcctacctgtttactctcagttctcaaaatttcatgtactagcagtctaaatcaatgctgccacagtttatgtggccattatttctagaaacttgtgagggtttcttctgtaaatgggaaaggatatggcaagcataccaacaaacctaggagtaaaactgttactccaatagcaacatatttctcacc

SEQ ID NO: 286 - DNA, 343 bp, Glycine max
  Clone ID: ASG32442DA-02-Q1-E1-A8
caagacaggactcagacgattacatttaattccaaatcagatatgaacatttttgcctccttacttcttgatgaatgtggaattggaattccccgaagaattccgatcacatttcctttggcttcaggataagcctaataataaatcatataattccaattcatatatgaaaatttttgcctccatatttcatgaaaatgtgcaattgggattccccgaggaactcagatctcagttcctttggcttcaggatacgcctaataataacacaaataattccaattcatatatgaacatttttgactccttatctcttgaaaatgtgcaattggaattccacgat

SEQ ID NO: 287 - DNA, 372 bp, Glycine max
  Clone ID: ASG32442DA-02-Q1-E1-A9
attacatacaccgtcttcgctttactaattcagaacagacattcagtaaacagataccgaataagcaaaaggtctccagataaataaataaaacacacagatacacaaagctataatatagtcacccttcactaccagagtttcatcttgcccccaaattttccagtctatgtttttatgacttttttgcatttgctttcgcagaggatcagatcagtcagcagtcattggatgggtcatgcaacacctgaaccgagccttccgaactgttgtcatgatctcattctctgcattctcaagcattcccacaatttcagcaaatggtggcctgacatcagggttgggatcccagcatcttgtcatgatgtcacg

SEQ ID NO: 288 - DNA, 325 bp, Glycine max
  Clone ID: ASG32442DA-02-Q1-E1-B1
tagatgcataacaatatgccagatattaatattgaaatgtatttatttcagattttggtttccacagggactattgtttgtacatgagaaggtcacatttgtggcaatcctgaataattccatgatctgaacctaccacagcgctcagtgaatcaataaagctcacgcaacttacaacttggagtccataccatctcaatgatactttcctaatgcttttctgaccaatgtgcatttgtatgggaataaagacaactatatgcccaaacccaattgctccatcaatggaaagaacctcactaaaaaacggcattaccatcgcaag

SEQ ID NO: 289 - DNA, 384 bp, Glycine max
  Clone ID: ASG32442DA-02-Q1-E1-B10
atggaacaagggcgcataatttattaaagccacgaaagagaaaacaacatagtgaagtctcttacatgacttgttgacacacagctgaaacaagataaagtgaagctagtgcccctatttgaacgcatcttattacatatagatagataggagcaagctagattgttgagaggtgaaggaactactgaatgtagtacaggggattaggaagcttaaaggtcctgctttcgcctctgtggcctccgaggagatcgctccattggtctccaatgatcccaacaatgttgtatccctgccttatcagtttctctctcgctgctgttttgtatgaaactgcatttggagtggaaggatcttgtggatccttgagaattaatttttccc

SEQ ID NO: 290 - DNA, 393 bp, Glycine max
  Clone ID: ASG32442DA-02-Q1-E1-B11
gtagaatttgataatattttttttataagtattggtttattccaatgttggatccacactatagcataaaaaagaaaaatataaaacaccagctttattaaagtcaaattatgagccgagtaaataaaacacgctatgtggaaaggagccagatacttgattctacaactcctcccaccacaactggtaaagactatgaaatgatactgacctcagggagctgcgggaacaatcttgcccgagcaggtaccaaacccaatagtgtaaccatttcccttgcaatatccagttaagataacttcatctccatcttcaagaaatttcttatttaacccattcactggtaccgcgttttgtccattccacgttaattctagcaagcatgcccgggac

SEQ ID NO: 291 - DNA, 365 bp, Glycine max
  Clone ID: ASG32442DA-02-Q1-E1-B12
gggacagaaaaatattattatccaataatatccatcctaaaagtgcaattaaagtataagaaaaagggaaagcagagtacagaagctgtataaaacggaaaaaattaattaattaaaaataaagtgacagaattttcactcaataatggattggataacaccagcaccaacggtcttcccaccttccctaatagcaaacctcattccctgttcgcaagccacaggaacaataagctccaccaccatcttgacacggtcaccgggcagcaccatcgtggactcctcatccttatcattcatgatagacgtaaccttcccagtcacatcggtggtcctcatgtaaaactgaggcctataccctgcaa

SEQ ID NO: 292 - DNA, 350 bp, Glycine max
  Clone ID: ASG32442DA-02-Q1-E1-B2
gtatactggtcttgcaataggcataaaagataatgtgtaacaaaatcaagcattaagtttcagtgttgaagatcccaaccaaaagagctatggcagaagtaggatagaaaccaaagacataagaaacagacacacgacaaagatcagcattttgaccagggactaaagttttgtttctcacttgaagcacttagcatccaaaagaggttctccctcagatgggtcataatcctcgatcatctgattgacgcgctctttctgagtttcagcagagatatcaaccgtggaccagtcatagagctccatatcagagcattcatcaatcacaaattgtggaatctcatggtcgc

SEQ ID NO: 293 - DNA, 349 bp, Glycine max
  Clone ID: ASG32442DA-02-Q1-E1-B3
tttttttttttttttttttttttgtcaaaagatcatcatattgaatttctaatgtacaacttgatattgatacataaccagtgaaataaaaaggagaggaaaaaaagagtctaaaattataacaatgctgcatgatacaattgtgagaagtatcgtatttcagtattgtactgaaggtgcaattatacggaatatggattctatcccaaccaaaattatgttgttgggcagtgtgagttgattctcttgatatgaacactagaaatctctttatgcaggtggaagagggccccggcaagtagggcactccatctttataaccatccatctttgcaaacagccagaattg

SEQ ID NO: 294 - DNA, 374 bp, Glycine max
  Clone ID: ASG32442DA-02-Q1-E1-B4
atttaagaatagattacaaatactaaaattaaagtattattatttttatattaggcattgtgaatattactaaagaagaaagagccctagtcaaaaatcaaaacaaaatagataaaagaatacaatgcatagtttccaaggctagcctttagcaacaagttaaatcccaatttccgataatggatcatactcctttattgttcgtccgtcacggtcacggaattgcctccctctaaccgattcagcgtgatgctgttgttcattcgttttccttcgcacatagcaattatttcttcgtctataatttgaagcttacacccaagattagattgactaggataggacatttaattccctgaatttgtggtgttaat

SEQ ID NO: 295 - DNA, 141 bp, Glycine max
  Clone ID: ASG32442DA-02-Q1-E1-B5
tgttagactttcagtaaatttactaataaccaaatttacattcaatgggacaaagatatatcatacacctcaacatgagcgggtttccatgtacagaacatgcaaatcaaggtatatccccctaaaacatagttacggtaa

SEQ ID NO: 296 - DNA, 333 bp, Glycine max
  Clone ID: ASG32442DA-02-Q1-E1-B6
acacaactaatacaacatagttcaatattgccattcagtttaggtacgtaacaggagcagcgaagcataaaagcaatgcatccaaattaaaaccacatcggtactggtacacatctgaacagcaaacacaacagaaaacagaccacaggaacaagaatctgaagtagattctagtagtcttcatcctcttcctggccctcaccagactcagcatccacttcttcataatccttctcaagggctgcaaggtcctcacgggcttcagaaaattcatcttcgtccataccctcacccacgtaccagtggacaaaagcacgcttggcatacatgaga

SEQ ID NO: 297 - DNA, 218 bp, Glycine max
  Clone ID: ASG32442DA-02-Q1-E1-B7
agaaattaaaaccattcaaatattagactatatttgttttcctcgtttgttcgtgttactcggtgaaacgcatgcctatgactcaaacttacatcacatttcatttcactaagttcataccaatatctacaaacagtaaaaaaagctcaatggtgcatcaactaaacaatcaggattttcatgtgcacattcacaatgccaattgcactcacatgttc

SEQ ID NO: 298 - DNA, 313 bp, Glycine max
  Clone ID: ASG32442DA-02-Q1-E1-B8
gactaaagacaagatatgtcagttaacaagacagaataagtcctacaggtaaagtgcataacaattgagtataccatctaataatgaaaataacgcaaataacataatgcgtaaagcaacgttcatatcagaagggaaaaatagtttgaatcccatccaacaaaaatcatgcgattaaaatccaattaaaaaagcatcaggtaaaataagtttttaaaacaggtatctggaggaaagcaactacatttagtccacttcctcaatcttggggccagcaccacttccacgagaaggaggagcagcatactcatcc

SEQ ID NO: 299 - DNA, 399 bp, Glycine max
  Clone ID: ASG32442DA-02-Q1-E1-B9
taaacaaactcaaccacatgaatttaacatacatgatatatataatagtttgcattcattttacttctccatgtaggaccaaaagataagtctcatagcaatcacagaatagatcctttagaacttttcccataattaaaaaccagcccatccagctggttgagaagttgacttgtttgcctcaccaaaagcctgagactttgttcctgcactgctaggtctttgcatgtgtgggctgccagcaggtacagcactgaagctatctgatccaaaaccccatgaatcaaaatcagtagctagtgcaacaggttgcttgttctgctgaccatttttcaccctgacggatttggaggtattttcagctgagaaggacttttgttgttgaggttcctccggaaa

SEQ ID NO: 300 - DNA, 373 bp, Glycine max
  Clone ID: ASG32442DA-02-Q1-E1-C1
taatgaataaaaattaaatttaaataaagaaatacaaccatcattccattcaactgttagaaaagaatttgactgcaaaaccgtatcctttgtaatttttaccgttattgactccttttgtaatttttacacgaataactatgtttttacaaatacatgcggcggtaaaaaaaatgtaaatactaatcacccctaaaattttgtgaaattacacaaacagataaagttcaaatacccctaacattttcagtgaacgcatgcgccattcaacgaccaggcatataaatttgattgcaaaactgtattaaaagaagttccggacctacttaaaagaagaaaaaaatcacggacctaatttaaactttttttttta

SEQ ID NO: 301 - DNA, 396 bp, Glycine max
  Clone ID: ASG32442DA-02-Q1-E1-C10
ttgtcccagagagaaggggagatatatatattattcaacaaggataagaacaacacaaccattcctcttattatgcaaacaagtaaacaaggggctaatttgcatttaaaaatctgaatctaaatttaacagaggtggtatcatctccaagtcattgtaaaattcttggacaaaaatgataacaagaagaaagtagcaaccgtctctttagatgtgaatgggcttgtcataagtggccattgcggcttctttcacagcctcgctcattgttggatgtgcatggcacacacgtgcaatgtcctcacttgatgcatcatactgtagtgctattgcagcttcatgaataagctctcctgcattgggcgccataatgtgcactcccaatatcttgtctgt

SEQ ID NO: 302 - DNA, 352 bp, Glycine max
  Clone ID: ASG32442DA-02-Q1-E1-C12
atccaacagccgaattggacgtaaacttcaacagcataacttggtgtataaggttaaaacttgcgccgaaggcagcaattcacaaaattgacaatataatcaagaaccgacaatgtaacagctacgttacgctgagaaatgcaacaccatactgtacaatgatattttagacgtaaattatccacacagtaataactcccgcaagacccttatttatccttagtagcacaccatctatggtatttaggtgtctgagctctacaagaaactccattgtcaacaaaagacatccatggaatgttgcttcaaagtagtgagcaaagatggtccaaaaactttccaggatcatttc

SEQ ID NO: 303 - DNA, 236 bp, Glycine max
  Clone ID: ASG32442DA-02-Q1-E1-C2
atttcattatagtaaccacatttactattgctggagtaatgatcacgtgaaatcacattagttttatggactacgtgcacttacgatccaacatgtaaatagcatacaagttacacacacaatcaaatactgcacagacttaagcaagaaataggcagtaaaccaacgtataggccagtgttggtcataaatattgcatcccatacgaaaatcaacacccgtttcaaatgcaacca

SEQ ID NO: 304 - DNA, 303 bp, Glycine max
  Clone ID: ASG32442DA-02-Q1-E1-C3
agccgctaagaaaaccaaacttaaccaacaaagtaaactcatttggaaatgaacattgttcaagaacaattagatcaaagctcaatgcaacaccaaggatgccacaaaaccctcttattttgaaacctatcctatattaagcctctacaggagcaagagctcgcagctctcattgtaccttaatccactgttggctgaaacccaaccataataataatataaagcacaaacttcaaaggaacgaatgatttttgctcaagcatcatcaagagcaaggacaccaaggagttgctttccctcaag

SEQ ID NO: 305 - DNA, 400 bp, Glycine max
  Clone ID: ASG32442DA-02-Q1-E1-C4
ttatcacagaacgtatttattcacataagtcattttttattcgttacaaatcgagtgattataattattgttaataaaaatgataacatgctatgctaacaatgacgacaacacactgaaacttgtgtttggtacaacgttgaccctaagcaccgatcatgtaaatgaaatctttcactaaagcaatgagttgcttcgctttcagtggatcgaaaatttctatcccatggaacccttcttcttcaaagtccttcatcacttgcacccccttttcttccatcaaccgtgccagctcctttccacgatccaccaatgggtctccaccattgccactcaccaatatcctccaccaatgctccctcatcttatccaataatttctcaaccccattctctgccgt

SEQ ID NO: 306 - DNA, 233 bp, Glycine max
  Clone ID: ASG32442DA-02-Q1-E1-C5
gacataatgcgtaaagcaatgttcatatcagacgggcaaaacaattactatcccattcaacaaaaagcataaaagtatagattcaatacaaaagcatcagttagattttaatcagataaatggatgaaagcaactacacatttagtccacttcctcaatcttggggccagcaccacttccaccagatggagcagcataatcatcctcagatgccctagcatgatcactaccca

SEQ ID NO: 307 - DNA, 266 bp, Glycine max
  Clone ID: ASG32442DA-02-Q1-E1-C6
tattgtagtaataaacgcgatcgcttctgtattattactggtaaacataagatgaactatatacaaagtgaaagtgagaacacactttactatatgaaaaccgagagcatccaaatacaatattgcataagttcatgcaagaattacgcattgacatgcataaagtctatgttaatcacaagtacaagatacattatgaaaccatagactctttctaactagatagagataccgtcgggaattcctttgaaaatcagcccttcctc

SEQ ID NO: 308 - DNA, 271 bp, Glycine max
  Clone ID: ASG32442DA-02-Q1-E1-C7
ttactccaatttctgattatcatttcattaaatcgactataaacaaccagatatattggtcaaaaacaagaaccacggtgacacaaaaccataaagatactcaaactcaaacacaactaaaattactgagcataatcataaaccctaatcaacgacatcaagccctagtttctccagcctccatcaacaccgtcaccaccacgagagtaaccacggtcaccaccaccaccatatccacggtctctgccaccgcaatagccaccgcaaccgc

SEQ ID NO: 309 - DNA, 342 bp, Glycine max
  Clone ID: ASG32442DA-02-Q1-E1-C8
aagaaaattacgcctttcataccgttcttggttattgggttgtaccaataaacctttgccaaaaaaacagatttagatttgcaaaaacaaatgtgtttctaaatgtcaaaacaaaactgaaaaataaatatttgtaaaagcaacaggaattctaaacaaacaaaaatgcattatcagccggatcaagctccaactacttcagttgcttcctcagccaaggtttcatcagcaggtctatccaccttggcaccaacatcttctgagtaatcaccatgaacccccatcagttttcctagatcaaactttggagctttaagaatcttaactttacgaataaacaca

SEQ ID NO: 310 - DNA, 283 bp, Glycine max
  Clone ID: ASG32442DA-02-Q1-E1-C9
ccgaaaagcgagacccagaaaaaaaaaaaaacccctaaggaaaaaaaaacaaaaaccaaaacaaaaaacaaggagtaaaaaccaggaaaagggaaaccacggaggccagttgtaaacccaccacgctaacaaaaaacacttaaaaaaaaaaaacttaaaccaccattaattaaaggggggaaaaaaaaaactccttaaaaaaaaaaacccaaaaaggggccaggaaaccccaactacacgggaaggaaaccaaccttggaggtacccccaaatctaaaaataa

SEQ ID NO: 311 - DNA, 344 bp, Glycine max
  Clone ID: ASG32442DA-02-Q1-E1-D1
tatatgaataataaatacacctctagttgtctgattaaagttgtcaacacaactgatacatcttaaaattacagggggaacagactcttaccaccaggatccgaaacaatcatataactgaatccacaagaatatgctaaagattagagctatagcactaatatcctacgaatccaaacaaatactttcatctccatcatgaatgatctacaacccttccagactacctaatataggatattgctgatatgaaccttgccatggaaacgtgtcgttacctccattggtccttggcgcaatctgacttataaatgccatggactcacgtgatttacgtggagttt

SEQ ID NO: 312 - DNA, 385 bp, Glycine max
  Clone ID: ASG32442DA-02-Q1-E1-D10
aacacaaacaaggttatgtcttctattcgacaattgtttcgataattccaaagtatcaacttatttgtcagctttgtaaaattaaattgagaaactttgtgaactcacaaaagatataaaacaaaactttagtaatttgaatgtgaagcctatgtggttcaactatcaggcgagtgcgccaaaacaaactaatacagtcgaacagggatcagctagaactccatagccaaattttcaactgaacctgtacctcatcttccacggatgaataactgaacatacatgtttaaatatcagctagagagcaaaagccttaaaaacaaaagctgagctctcagggtttcctccctgaatacacagaatcaccttaaactcaggcaacctg

SEQ ID NO: 313 - DNA, 380 bp, Glycine max
  Clone ID: ASG32442DA-02-Q1-E1-D11
ttatataatatccttattgaaattaaaaaaaaaacaacagtaacatcggaagattaaaaaacatagcctcttaatcctcccatccccatgaacctgcagtggtctcggttcattgaaccagcccatttaaaggaaaagaccttaattattttttgcataatatattacagattttcttcctcgatcatagacaaggggaggaaaattcaagggtcctgatcatggtgcttgttggcaacattgcactgctttctgacctcaccctttgtgccagtgagagggttgttctctgagagcaaggtaatggctctagagaactccttgaagaaatagtcttggctcttggccattttcttcacataaggcttggtcctcttgtc

SEQ ID NO: 314 - DNA, 371 bp, Glycine max
  Clone ID: ASG32442DA-02-Q1-E1-D12
catagaaaaacacaacgtcatatttcacatttaagaagcatgagaagatccatatatctataaagactcacatatataataattacatagagcagataaaagaagaaaagtaaagcattaagcaaccaagatcattgttcccaactagtgttgtgcagcatagtggttaataagcgagagagcattgctagtaacctgagcaacattgagcatcctagccctaatagagtccttgatcttcccattcagcgccttcccggagaatccatcgccgcaagtgctctcatcggtcaaagcagaactgacccatgtctccacgttgctaatgtgccacgtgaagtcctcacccttaaccttacatagcttgagct

SEQ ID NO: 315 - DNA, 364 bp, Glycine max
  Clone ID: ASG32442DA-02-Q1-E1-D2
ataagtattggtttattccaatgttggatccacactacagcataaaaaaagaaaaagtataatactcataaaaaaccagctttattaaagtcatattatgcgccgagtaaattaaacaagcaggctcttgatacaactcctcccaccacaactggaaaagactatggaatgatactagcctcatggagctgcgggtacaatcttgcctgagcaagtaccaaacccaacagagtaaccatttcccttgcaatatccagttaagatgacttcgtctccatcttcaagaaatttccgatttaactcattcactgacactgtgttttgtccattccatgttaattctagcaagcatgcacgggactct

SEQ ID NO: 316 - DNA, 349 bp, Glycine max
  Clone ID: ASG32442DA-02-Q1-E1-D3
caagttcaagtaaacttctcattgatataataataagcaatacatatcaaatcattattcttgcacatgcaataagcagatcgcatttcacattatccaaggaacacatctagttgtagcactcgaagcacactaatataatggaaatggctggctagctagttttacttggggcaaccaggccattggacatccgggggagaaagtgttttaagaaccggattcctctcgaagaaattggttggcctgagctcgaatgcagtgctcaataatggcattatggggaaagtctcccggtgctggaacatgatgaatttccacaacgtgccacagcacaatgtccttgttg

SEQ ID NO: 317 - DNA, 348 bp, Glycine max
  Clone ID: ASG32442DA-02-Q1-E1-D4
tctttttttttttttttttttttttttttttttttttttttttttttttgcaataatcaaaatagcatatggagttattatatcaaatacgtgattgttacatgcaacaatcaacttagatacatctagtgatcactcacacccaacaacaaagactatgaagtgtctgaagaaatataaactaatacaataaaaggctcgcaaaagtgaagccctacagtcacactcgatttctcttactctgatagtaagtgcttcactgctgcctcagtatcccgctgcagaaatgagcaaatctgtccatggcttgttcagaacctgatgcttgcacaattaatggaaccggtg

SEQ ID NO: 318 - DNA, 229 bp, Glycine max
  Clone ID: ASG32442DA-02-Q1-E1-D5
atatataaaatcaaacaatttggaattttttaaaagatcagtctcaacaaaagtttggccaacttaacgggggaaaaaactcactactcggggatccataatgtcaaaagagaaaacactacagtatgtttataagatatggtaaccgaatagaaatccagcatttccatccaattaacaaaattatgctttgaggcgtccaaagaacttctgcttctcctgtgtggtc

SEQ ID NO: 319 - DNA, 174 bp, Glycine max
  Clone ID: ASG32442DA-02-Q1-E1-D6
attggtttattccattgttggttccatactgcagttatatatttgtaattgtccaactttcattcgaggggagccgaagtcattcatcatcggtgccaggtcacattcaacttaatgctacggtatgttgacctggcgcaagaactgctacgaatgaaggaatgaaatacatgt

SEQ ID NO: 320 - DNA, 359 bp, Glycine max
  Clone ID: ASG32442DA-02-Q1-E1-D7
ttacgatatagaacagatttattcaagcaatatgaagcccaaggagtgtctatatttcaccaagacagcaaagcaaaaattcatatctaatgagacaaaatggcccaataaatctacaacaagtttgcacaacagaactcaaccagagcttactattctttcaaactaaaagtctcataatttatttcaatcaggtggcttttgcaacattccccttgggctccccggaacaacagccaccgccgtgctcgtgacggtggtggtggtgatggtgatgattgtggtgctgcttcaccttgagctgcttcctcatgtcgtaagcatcctcaccgtccgcataatactttggctccacatca

SEQ ID NO: 321 - DNA, 331 bp, Glycine max
  Clone ID: ASG32442DA-02-Q1-E1-D8
aaaaagcaacaccacaactattacaattccataatcgtccttgataaagtgtttccatgtaactagactttgacaatcatgctttttttgcttgtataattaactaacaaaacaaatagtaaattaataacaggggagtaaaagaaaaatcatattggactcattcaattcaaatcctataaaactgaaaatgattgaacagtatgtaaggagacatgagaaaaatatgcatatgaattggtgtggggggggggatgagatgggaaggaccacatgaagaaaaatgcaaaatccaaaagagtaagaatgacaaatggaagaaaacaatgga

SEQ ID NO: 322 - DNA, 391 bp, Glycine max
  Clone ID: ASG32442DA-02-Q1-E1-D9
aaataagaaactgtatctaaattttatcgattatgtaccgttgtaggcttaatactactcaaaatacattgcaaaataatcgccggcgaccaaattcacctcacctcatcccttttgccccatcatctcatcatatacaatgtgaactaacgaatacacttccaattgaggccaaagagcatgattcagaaaatttaataccatttaatcgataaatacagaaggaacaaaattatatttcacaattgcatacactattcttttgtccgtgatctgttgaggtcatctttcctcgtggggcgtatccttgtttaataaaatgaacaaatgagtcgtactactcacctaagcaggtggtcctatcctttgttgtgtgtcacaccagttccat

SEQ ID NO: 323 - DNA, 315 bp, Glycine max
  Clone ID: ASG32442DA-02-Q1-E1-E1
aaataaatttccttgatttgccaccacgctggtgagtaggaagcttcaatgccattttgtcatgttaatgacatagtttggaaaatgtaaacaaacggataattttgtaaatcatggggttggatgcttcccaacagcacaaactgaacacagaatctaagtacagtttaatcagttggcacaatgcaaagcgacccatgtccaggactatgctctagaggatacatggttgttctcttcacataccgtaaatgatcaagtgcaacctttctgagctttgaaactgcatttacatttcattttacttgcatctta

SEQ ID NO: 324 - DNA, 392 bp, Glycine max
  Clone ID: ASG32442DA-02-Q1-E1-E10
tacagtcaactaggcgttcaacattatttacccaccaaatgttatggtagttacactatttttgcattcagaaatttaatcaaaatccaattgatcgcctatggatgagatctcaaaggaaagcgtgtttattcagtactaaacagagttcaaaacattggccacaaagcacagatccaaaactcaaaaacagcaatttccgaagcagcttgaaaggcagcattatatcagttcctaactacgaatttcaattcttcttcacagtggcagcatttatgatgtccacgaactccggcttcagggaggcaccaccaaccaaaaatccatcaacatcgggctgtgcggccaattctttgcagtttcctccatttacagaacctccatagataatt

SEQ ID NO: 325 - DNA, 359 bp, Glycine max
  Clone ID: ASG32442DA-02-Q1-E1-E11
ttttgatagataatataaagttctattattcataacttggagtacaaagcaacattttttcaccccctttttccatcgatgatagtcttagctttgccatagcactgcaaagtgtaaacaaaagcttgaaatgaagaagctaagagcaacccttgcaataatttgtaatctataactacattttgagcacctcttatttagcatatactcaatacacctcttgacatccttcagaaatgggtgtcatcagttggagggtactttgggtatggtggctttccatatggtggcttgtagaccggaggcttctcaacaggtggcttgtaaataggaggtttctccactgggggcttgtaaac

SEQ ID NO: 326 - DNA, 396 bp, Glycine max
  Clone ID: ASG32442DA-02-Q1-E1-E12
ctaggaatataattgcatttaataattaagaaaatgttcaaagatattgcggaacttatttcaacacaggctaccaaattcaaagataaaaggagattgtctacggaacagattgcaataaactatttttcaaaagtccttacgattaaaagaatccacgttttctcgagataaacacaaaaatttcaagttacaaaacccaaagcaagttgttctaggagagaacagccatgacatctgagactctcaaggtaatatagtcagaaccatctttgcccttgaagtcatttccagcatatttggagtacaaaactgtgttcccaggagtcacggacaaaggttttctgttgccttcctcgtccagaatgcccgggccaaccgctatcactgttccaa

SEQ ID NO: 327 - DNA, 264 bp, Glycine max
  Clone ID: ASG32442DA-02-Q1-E1-E2
atatataaacaacccatcttaaattgacaacgtgcaaaatcatacaggtattcgaagcagattacttcgtgtgcccctagcatttaacctagggaacgaaggatcaagttacaaaagaatattattttaaaagaatttgtttgggactatagaccaaaaaacaaataactgtggctatgtacactagcaagataaataatacaaaatttagacaaaaatttcttttcaaccgtgttccaatttcaaagccgtcacagtaaagac

SEQ ID NO: 328 - DNA, 297 bp, Glycine max
  Clone ID: ASG32442DA-02-Q1-E1-E3
atatataaacaacccatcttaaattgacaacgtgcaagatcatacaggtattcgaagcagattacttcgagtgcccctaccatttaagctagggaacgaaggataaagttacaaaagaatattattttaaaaaaatttgtttgggactatagaccatataacaaataactgtggctatgtacactagcaagataaataatacataatttagacaaaaatttcatttcaaccgtgttccaatttcaaaaccgtcacagtaaacacggaaacaggtatatcacttgttagaccactgaa

SEQ ID NO: 329 - DNA, 265 bp, Glycine max
  unsure (1)..(265): unsure at all n locations
  Clone ID: ASG32442DA-02-Q1-E1-E4
cacaactaatcagctgaacttattaagaataatgcccccggtcaggtttcttanagatgacaaataaaatccttactttaataacaaaaatgttcaatgcaagctcttccaatataaccaattcgcgtagttcacccctccatggaactggactttgatcagcagaaccagcaactcatataactctggtggcagtgaaaatatactgcaaaaaattatatatactctgatctgatccttaaaggggttcaagagaagtgtgtct

SEQ ID NO: 330 - DNA, 364 bp, Glycine max
  Clone ID: ASG32442DA-02-Q1-E1-E5
ttacatacatgatatattccttattatcatcatcattgggttaaaagaaaataaaataaaaaaactatattgtagtttattacagtcacaaataaaaattatatgggcaaattggtttggtttaaactttaaactatgaaccaagattttgaaaagggtctacagtggcagtggatcaacttacgttgataacccagcaatgaacgccactccggtagagggcaaccaggacgagcccgatataaactggcccaccgtgaatctagacgcttccaccgtcgaattgatggcccgatagccggcccaattaacccgttggcccagagctgaacccggcccataattcatgtattcaccataataa

SEQ ID NO: 331 - DNA, 367 bp, Glycine max
  Clone ID: ASG32442DA-02-Q1-E1-E6
ttttcaatgtaaacaaaagccatgcataagaacaacaacatattacggaaacatgagatccaatataccagatggacaaaaataaaaataaaaagcaagccaatataagaacaaaccgataggtgccgcataacatgtacccaaaggtcccaaactccactctcactaccatcaaagtattatcccgcaaaccgtacatacactattagtaattacaatcttcttcacgttggagtgcagagcaaacacacttacgcatcacatagcataagtaagacacaggcatcttcacattttagtctcttcacatatggtcgtctgcctcaccatcctcttcctcctcatcctcgtactccccttcgtcctc

SEQ ID NO: 332 - DNA, 305 bp, Glycine max
  Clone ID: ASG32442DA-02-Q1-E1-E7
gccacagaccaatgtactattactcaattaaacaaaagatcattcattactcggactaagatacgaccacagatgtattgccctgttgcatttaaatgatatgcatactatggaattcgaaaagaagatctaacttaaagttacaaccttttttttatggatccacacataaatttacccctgacaattcattattcaagcaacggcacggtgcaaaacagttggcccaaatcatcttcaaaaacttgccatacaattgcccagtctttaccaggaagttccttttttcatcaatttccgcaggg

SEQ ID NO: 333 - DNA, 250 bp, Glycine max
  Clone ID: ASG32442DA-02-Q1-E1-E8
agtacaaacactcaaaaatcaaaatcttcattgaacgaaaaactgaatataaactagtgtcaggccgataaaacaatctatatgagatggaaaattatcattgattccaactacaaacaagtcttcctagaaaactaaacaaaaaatatagcagatagcattatacttaaggaaaatttgagctggttggcgctccaaaaccaccagattcacgagcaaagccagaccttctatcagcacccccaaaaga

SEQ ID NO: 334 - DNA, 389 bp, Glycine max
  Clone ID: ASG32442DA-02-Q1-E1-E9
tttttgcaagcaactaaaaatctaaatttacatttagtcagttcaaattcattacaaaaccaaagatgaagaaaaaaaaaggaccatatatgtaaaaaaaaaaaaaaaacttgatggtttctacctcagctatcaacttctgtgatggtagttctagcccccagtcatctcaaattaaatctgaatctgaatattatgattgcacagctttattttgtttgatacaagccggtgccttcaactcctggcatttgcatgttgttgtagcctcaattgggatcacgctatcagtggatggctccattggaaacaaagggatgttaccaacagcatgattgccaccagtgttcatctcagtcaatggagcacttctagctctcagaccttcc

SEQ ID NO: 335 - DNA, 345 bp, Glycine max
  Clone ID: ASG32442DA-02-Q1-E1-F1
gacaatataacagcaaatctctgttgggttacaagtgtaagatgaagtttcacatcggacaaaagtggaaaagttaaacatcatagtgaggagaaaacccatatacctaagccttaaggttttggtaagaatcaaaatcacatacaaactatttgatacacagaacaagaccatacagaagaacaatacaagttaaatgtaagacattaacaaataagttggtcatgtgagctttcagagagacaataaacttgacaaaacctcaaatttcgaattcaaagcactcagatcacataactcttaatcagttatggctgatgagacttttagaaccaaagctgattt

SEQ ID NO: 336 - DNA, 373 bp, Glycine max
  Clone ID: ASG32442DA-02-Q1-E1-F10
aggttagaaaaatcgaatcgtttgataaatgaagtcaaaacaggatgaccaacagtatgataacctactagccaagggtaaaaaagaaaaaagaaatactataagaacgtaaagtttacagtatattgtttacacaaagctccttgaccaaaattaaatgaagcatcttaatacccataattggtaccatatacggggccataatctgcagaaggcgcatggcctgtatgaccaccagcgctagtgggtggaggagcataaactggagcagttgttggataggcactgtaaccttggctgactgatccccccataggatcctgtgtcgcacttgcagcttcagccatgaaattctgaaccagctgctgggctg

SEQ ID NO: 337 - DNA, 354 bp, Glycine max
  Clone ID: ASG32442DA-02-Q1-E1-F12
gttgaaaagataatttattccattctctggcatgccattatttatttgatatcaacgatgacttgattacattgatccgaatcggggagcaggtgatacacactgcatgtctgtgatatccaggaaacaaacaagaagaaaaactgggcatgcatgccaaaggaacaatagatttagatcacttgagaaggaattttttcagccaaaacgcagaggacttagggtatctactcaaattgttcttgtaatccacatatatgatgccaaatcgagctgtgtaaccagcatcccattcaaagctatctgaaaatgaccatatatagtagcccttcacattaactctatcggctcgag

SEQ ID NO: 338 - DNA, 342 bp, Glycine max
  Clone ID: ASG32442DA-02-Q1-E1-F2
ggcaaatgtgaagacacttaatattaatagaaaatttatttcagtgatacagattacatagtgccacccatcatttcactttttcaaccattgttactatggataaaccgcgattagagacttaaaacctagaactggagttatcttgtagctattgaaacctgcagacaaaaacaatttagcccagtctttctcatttctctctttcccagtgactaacaccatcatctcaatatcatagaagagctttgtttgatctaattcactgtctcctttctcgtttcctatcagcacgtctatgataatcacctttcctttagccttgtttgcgaatggctcctt

SEQ ID NO: 339 - DNA, 360 bp, Glycine max
  Clone ID: ASG32442DA-02-Q1-E1-F3
gacatgacaatttcatatattattatacttcacaatcagcattacttttgtttgagactgaaaataaccatattacattattattattgtaacaatcggaaaacgagggaaaggaatagaaaacaatgaacaacccttggcagttggttgcaccaaccaaagtagccacagatcgaaatcctagaaaaatcaaaaggtaaaaaataaaaaggaccaaaccctacttagaaaagcataactgttccttgttccttgttccttgttccttgttccatccaaagggagacaacatgcaagttttgctcatggcttccacagaatggttgtgtctgcaatcatggaagtaaccacatatgggtc

SEQ ID NO: 340 - DNA, 367 bp, Glycine max
  Clone ID: ASG32442DA-02-Q1-E1-F4
tttattcaacaaattaaagcgcaattcatataaattaataattgaacatgtcacagagaagcatctttgctgctacttgcctaggattaaaacatacatgcaacaatctcaattaaaaacaaattggtttttcaaataatagcatgacaaacaacagcagttccaatcaggacagaagagagatagtgtggctcgacatcctcgcatgtcgattttgaccatattttcctcaatcctttcactggtttagagggagcaggtgtaaccaggaggaggagacttgccacaagccacaagaagctgaagggcaagtgggacataaatgttgaggttgaaaagcttcagcttaagagtggtgcaaagacac

SEQ ID NO: 341 - DNA, 333 bp, Glycine max
  Clone ID: ASG32442DA-02-Q1-E1-F5
ccactaaaaattccgattcaatcatttaatagtaaccacaatttcccaatttagatataaattaggttttatattttcaacggttttccatctatttgcataaactttcatcgaggctgcaattattggattttgctaatctccaaagattagcatacatgcccaattggagcaaaccatctaactaaccaagcaatttaaccaaatcaatttattctggaaacccataagcaacaatacaacacctatcaaagaatacctagagtgtcgccgctcaaatgggtggctgttgcagagttatgcactgtagatttccatcggggaagcaaatct

SEQ ID NO: 342 - DNA, 156 bp, Glycine max
  Clone ID: ASG32442DA-02-Q1-E1-F6
gctcaatgacaatgattttgcattgctctctataatattgccatttacagttacttacacgtctcatgcttactttgactaagctctataaaaatacataccggaataccactacacagacatatcgtataaatacaatatgctcataatcacatt

SEQ ID NO: 343 - DNA, 389 bp, Glycine max
  Clone ID: ASG32442DA-02-Q1-E1-F7
ttccaatcaatagataatatgttcttattttatttttctccagcaagctcatttaatattcttattagcgttgtaatacaagcatacaagccaaatagtacatagaaccatttccaacgtcctgcatttcgctcactcagacactattgaactgcatatattaatcaaggggcacatttttatccttttcaaaacgccaaatatgctagtgcttcaacttcaaattacatgctggcaacttcatcaataactttcaatagaaaatgcttcagttttcttcttctgcgattgtgtccccagtactgattatgcagtacaaaagagtcagtcggtactttcttgccatcatcattgcgattccagtggtagatagcatgggtcctattttt

SEQ ID NO: 344 - DNA, 358 bp, Glycine max
  Clone ID: ASG32442DA-02-Q1-E1-F8
tttttattattttttattacaatttaaattctaaatgatttagtaaaaaacataagtccttatcgatcacttatacagttaataacattaatcaaccaggcacataacatttgagacgagatcaccacatataatatgtcagaaattaaaccatttgcaacaagcaaaaactttgattatgttacttagtaagataccaaggttactacgaccaaagcatgtccctcactcacagggagttagccggtagctagtcaggggcaaatgcagattcatacttcagaaactgaacgacttaaggggtggttccaaacaacagcaaggcgctgaatcccttaacaatggtacgaatcccaag

SEQ ID NO: 345 - DNA, 394 bp, Glycine max
  Clone ID: ASG32442DA-02-Q1-E1-F9
ctgcactaagtgaatgtaagcataatggccacgtaaacgggcataatcctcaggtgtcgagcctgtgctgtcacgagcatttttccatgcttcaattcccaccatgcaaggatcattagtcaaagcatcaagtacatcctcagaaccatctttcccggctgctatatggagtggtgtcaaaccagcaggaccaacaacatcaggtctaaacaagaaggtctgattctcgccatcaaccagtgccttgtcttcaggtcctagtttatcagaaatattctcaggaacatatctcaaaagacactccactaactgcttgctgtttctccttacagctttgtgaaggagacccatctctgaaaacgcgagatacaaggaaggatgatctcctggtatt

SEQ ID NO: 346 - DNA, 344 bp, Glycine max
  Clone ID: ASG32442DA-02-Q1-E1-G1
ttgttgaaaagataatttattccattctctggcatgccattatttatttgatatcaacgatgacttgattacattgatccgaatcgaagagcaagtgatacacactgcatgtctgtgatatccaggaatcagtcaagaagaaaaactgggcatgcatgccaaaggaacaatagatttagatcacttgacaaggaattttttcagccaatacgcagaggacttatggtatctactcaaattgttcttgtaatccacatatatgatgccaaatcgagctgtgtaaccagcatcccattcaaagctatctgaaaatgaccatatatagtagcccttcacattaactc

SEQ ID NO: 347 - DNA, 378 bp, Glycine max
  Clone ID: ASG32442DA-02-Q1-E1-G10
aattgaaaactgattgacatatttggatgcagcaagttcaaccgttcatatttggaaatcaaatggactacagaaatgtattcaaaaggatgtccttcaaatttgaaattgtcattatctctgcctttccagtaaattttaatctaaaatgcaagagatgacctaaagatctatcacacgtgacaatttctggatccgattcagcaggaagtccccttgcttaatagttgcttggtaaagagcattcttagcatcagggcgattagtttcaagaacacctgcaactttatcaatcttacaatgaagcttccctgctgcaataaaacgtgatagctccacatcaatgaaatctactgtcactccaaaggcttttgccat

SEQ ID NO: 348 - DNA, 394 bp, Glycine max
  Clone ID: ASG32442DA-02-Q1-E1-G12
tgataaaactaaaggaacataactaacaaagtaaaactccttttgaaatgaacattgttcaagaacaattagatcaaagctcaatgcaacaccaaggatgccacaaaaccctcttatttcgaaacctaacctatattaagcctctacaggagcaacaagagctctctcattgtacctcaatccactgttggctgaaatccaaccataataataatataaagcacaaattacagaggaactagtgatgtttactcaagcatcatcaagggcaaggacaccagggagttgcttcccctcaagaagctctaagctggcaccaccaccagtggagatgtggctcatcttgtctgcaagaccaaccttctccacagcggcaacagagtcacctcctcca

SEQ ID NO: 349 - DNA, 368 bp, Glycine max
  Clone ID: ASG32442DA-02-Q1-E1-G2
aaaacaaggataagagtaccaccaatagaattagtcaagcactgaactcaaagtttcaacagggataagagtaccacccattattgaaataatcactcaaaatacagtaatgcacccgtataacatatcaaagtggcgtgcggaaaacacacaggctccatgaatatgtcccgagagcacgatggatgaggaggaggagtcaaacacaacacagatacaaattaaaagataatcagtactactaggcagaaccgaatttaagagaattcgagccaaatatcttagctaaatggtacaagagctgaaagacacggtaatttcttcagccctgagactccaccacacttactcctcctcttcagcctcct

SEQ ID NO: 350 - DNA, 307 bp, Glycine max
  Clone ID: ASG32442DA-02-Q1-E1-G4
gacacttgtattccattccatgtcattattttccaattgaaaatctcacatttctcgagtatcatcatacttcaagcacaaattgatacaagaaataaggataaccaccaagacatacttcaagcaatgtaacaatttgattaagcatcaagtgtcgatacaatacatgcaaaacacagaattcagcagtacagaccggacctaaccaaacgggtttaaatgggtgctactttattccacagatctaaagcacgtttccaacttcatgtgattagcttatccttgcagaccaatgataccacaagct

SEQ ID NO: 351 - DNA, 372 bp, Glycine max
  Clone ID: ASG32442DA-02-Q1-E1-G5
tagaaaaggaataactggtaccatctattacattaatgtaatcgatctacagacgatcacaccgagaacttcattgaacagagagcatgaactacttattttccattacagtacacgagaggagtacgaagtttattttgagatacgatgtacctgtacttataaaggcatttagaaatggaaccgataactttatagtttgagatagagtattagactcttatggagttggaattggcttgtgaattggcaatggtggtagaagtggtttcttgaatttggggtgaagtggtagcttaggaataataggctttttgaagaaaggctttggttttagaaattccgccgactcaacagtcgggatgggctttt

SEQ ID NO: 352 - DNA, 347 bp, Glycine max
  Clone ID: ASG32442DA-02-Q1-E1-G6
ataagactgataataacttcagaccttcattgtacctaaacaaaaaaagttgaattaagacaacatcaaatccaacaattatagaaaagcgacacaaaatatataactaccagaaaccaccagcaacgacagtattcattttttccacagcataaaacatgaaccgaaaccaaaagccaaagacacgaaaacaccaccaccaatcttcttcaacggtaagacttctggaacctcgcacgtgcgccacgcccaccaaacttcttgggctcgcagcgcctgggatccgcaacgagcaaggtgcgatcgtatctcactagaatgtccttgatcaccttcatactctgttc

SEQ ID NO: 353 - DNA, 333 bp, Glycine max
  Clone ID: ASG32442DA-02-Q1-E1-G7
aacaacatcaagctttcaaggattcgggaaccatgacatggatcaaatcaacccttcactccattccataatacactattaactaattacctacatatgaaattctctctaacgccaaatccctttcactaggccctaaaaggcaagctccgttaaactgaactatttctccacagattatacagcatctgccacaacattaaataccacattttacctgatgattaatgacaacgtgaacggagatcatcaaaagggacaagggaaatggtgttagccagtagatccgggcgcatgtaaacacctttacacatgacttgattgaccgcaatt

SEQ ID NO: 354 - DNA, 375 bp, Glycine max
  Clone ID: ASG32442DA-02-Q1-E1-G8
atatttatgttcgacatatgtagtagacgccgagtcatgagcttgcagatgagggtctcacatcttgcgccggtatcatgcatgcgtcaacactcacattgatacaagaactaaggataaacaccaacacatcattcatgcaatgtcataatttgcttaagcatcaggtgtcctatattcacaagcaaaatacagaattcagcattaaagaccggtcctaaccaaacgggttcaaatgggtgctaatttattccagaaatctaaagcaagtttccaacatcagtgtaatagtttaggcttgaataccaatgataccacaagctactctgccatcaacatttccagtaattttgcgaaactcaagaccacctttcc

SEQ ID NO: 355 - DNA, 298 bp, Glycine max
  Clone ID: ASG32442DA-02-Q1-E1-H1
ttgatataaaactttatttatggggataatcatccataagatccgataatcgaactatgctcatatgcattaataaaaaggatcagtaaggatcttcaactgtcatcaggtcatacatgagtatggcatatgaccggtcacagtcatcatttcatgatactatcctttattgacgatgaacaaccatccatctagattgtacaagtaatcggaatcaggcttcagttggtattcaccgctatgcttccgcttcaactatatcatcatcgttaatcatgacaacacaaatgaaatcttc

SEQ ID NO: 356 - DNA, 351 bp, Glycine max
  Clone ID: ASG32442DA-02-Q1-E1-H10
tggaaacttaacatacgagaactactctttgatgtaatgttaaaaatttattggctacacgttgatagcagaagcgaatccaaatataatagtgttatacaacaagaaaactgagtaaaaggcacaccgttctcatcttctttggtttctttgttctttcctccatttcccctttcgttcgaatcactgtcttcgtaccgttaggcccattttcttcccgcttgtgctttctggtctggggctgatactctgattgttcattttaataaccatatgaatcaattttttctgttctgttgggctgcatcatcatactgctctgcaagtttctttactttctcgccttccttt

SEQ ID NO: 357 - DNA, 391 bp, Glycine max
  Clone ID: ASG32442DA-02-Q1-E1-H12
ttttggcagagaaaattgatggttctgtttctcagtacaagttttagaatgaaaaatgaagcaacaagtgtttgtagtggtagtagtagtagtagtaagcatacaaaactacaatggcatggtacatacatataataattgaattaccaattcagaatttgatggctctcacttccacttgttggcaacaatgtcagccaaatccacaaccctttgggagtagccccactcattgtcataccaagcaatcaccttaaccatgtcatctcccatgaccatggtcaacgatgagtcaacggttgaggacacatcagtgcacctgaagtcaacagacacaagtggctcatcacacacagagaggattccctggagctcattgtctgcactctct

SEQ ID NO: 358 - DNA, 347 bp, Glycine max
  Clone ID: ASG32442DA-02-Q1-E1-H2
ttttcaataacagaatatgataacaacttggattcaagaactggaacaagaataagcatccccacaatcttgagaaacttagtcgacatgcactgattgcaaaacatggtgcaataatcaaactgttcagagatgctatatcttattctgcaaacaaaaacgctatgctactttctagatactactaccaacatcagggttcaacaaaattattcccaataagcaagcatgatactaaacagtcacaaaggaaagttcaaaccatcccacctgacggacaagaagcccccggctacattaatcatcacaacttattgttgtaccaaaatacacctttgctctgagta

SEQ ID NO: 359 - DNA, 326 bp, Glycine max
  Clone ID: ASG32442DA-02-Q1-E1-H3
gaagaatgacctctgaaatttataatatacaaatggattaacacatttttccttctttttttacacattttaaaactgattactatgcttgcaaactcattaaatgaatgggttgctcttcaacacatgctggtaacttgagatgtatacagttgtaactcaaaagtatcacacattgtataacagttacctcctaaccattttggtaaacttctgagggcctagaagtgaaaaaccatacgcagtaggtagtgacaagagtttctttacttttcctacatatgccctttttgtgaagttattataatcattggcttcaatggaat

SEQ ID NO: 360 - DNA, 194 bp, Glycine max
  Clone ID: ASG32442DA-02-Q1-E1-H4
accaaaaaccaaaactaaagctagaaacatcttgaattcttgatacataaattccaaaatattaatcaaataataataataaaaaaaagtgcctctgatctgtgacttaatttacaagaccacagaaaatatacagaacaaacaacaacaataaggtaacatctgggatcatgttatttacagcaacataagat

SEQ ID NO: 361 - DNA, 275 bp, Glycine max
  Clone ID: ASG32442DA-02-Q1-E1-H5
ggtatttttttttatttgtttattttttactgatatctattatttattattggtttttttgatttttacttcattttcgatatagttgctgacagaatgaatagcttgacaactcattggttcattgcatcgcacgacaacacatactgatctattaaaaggaagaacgatggatctctgaaatatgacacacagaagtacagagacagcctaacgatcacagaaagatactgatcgccaacagaagcagcatcaacaggagttggcagggacaa

SEQ ID NO: 362 - DNA, 339 bp, Glycine max
  Clone ID: ASG32442DA-02-Q1-E1-H7
tttgtagttcgagacataaccatagacaatattaagttaatcgcaagaatacaattcgtaaacagtcattaaaaagtatcatcaagtacctaagcactttctcattgaatctgaagctgaaactaagcacttgcttcgcatgtctgcatatttctttacaacaagctcctataacaattaaaacagatgcctagattgtactggtttggaaagcatatgatttgccggatgttgcaaagagaaccataaggaagagttaaatgagacacgggcagatttttactttcatgaaagcttcaacttcagctttatggcttgtgaactttgaacccaaaaact

SEQ ID NO: 363 - DNA, 122 bp, Glycine max
  Clone ID: ASG32442DA-02-Q1-E1-H8
tttcttttttttaccattttccacaacttgggctacaaatatcttcaattctctgggacatctattcgaagattataatcaaattataccacataataaaatggctctgatctgtgacttaa

SEQ ID NO: 364 - DNA, 2260 bp, Glycine max
  Clone ID: LIB3-02-B3_FLI
attcggctcgagtggtggcagactttgctggtgaagcgaattttgtttcctagtcgttggcctttcactgtctctctctccttctcctcttatctgaatcatcctctctctgtgagtgaggtgactcgttgttgtttgtgacccggcgattcgttcctttgactccattcgaagcaaccctttgtctttcttaagcagtttcctgtgatgggctttggatttttcttttggattccctgtgatcacctgggaactgggttgttcaaattgaattttttgtgaggtatgctgtgtttggggtttgacatggttgaggttgactctgaaagattgaaacttgagagtagaggagtggggatttggctgagaattgcatgtgggtggttggtgtttatgctgtttttcagtcctgtggcaggtttgagacccttgaggacagaactaattcatggggtgatgagtgggtttttacaagaaaagacgaaagtgacttaggtccattttcacaatggaacataagtggaactcacagagggaattggaagtttttagatactacaaatggttctaccgggatttccagacatcagaaaaataaatggaaattctgtaattgaattagttagtatgcccacaaagataactggtgtacattatgtgcagggggtagtcatattccatgatgtatttgacaatgaatacaatgttggtggagctcaaatcagagtagaaggtgtatatatatggccttataggcagcttcgaatggtagccaacagtggaaaagaggtggggttaaatcaggatggagattatattttatccaatccatatcatctgcttggagttttctcatcacaagtattccaagagtcttcacaacataagatgtggagaagaaagcattctccattacatggcatggagaaacattgcaatgtagaaatcgctgcacatgtttcacgcctgtcatcatcaaaacatgaaggggagcacgattctttccagctagaagggttaatggagagtccgtccgtggatgacgatggggactgcttctcgcctttacagttaaacgcaacatccatcaacattgaagtctactataataaagcattgaactataccttgatggttacttttatctcatttttgcaagttcttctattaattcggcaaatggagcatagcaacacccaatctggggctgctaaggtttcaatattaatgattggtcagcaagccatagtagatgcttatctttgccttacacatttgactgcaggaatactagttgaatccctgttcaatgcttttgcaactgctgcattttttaagtttgtggttttctcaatatttgagatgagatatctccttgccatctggaaggcaagtaggcctttgagcaatggtgaaggttgggagacaatgagacgtgaattgtcagttttatacagccgtttctatgggatcctattgggaggcatactgctcatgtatgaattccacaatcatttgagacctattcttcttcttgtatactcattttggatacctcaaataatcaccaatgttattcgtgactcgcgcaagcctttgcatcctcattatatcttaggcataactgttactcggctagcaatcccattatatatttttggttgtcctaacaacttcttgcacatagaaccagatcagagctggtgtgtttgtttggctatatttgttggacttcaagctgcaattctcttgcttcagcactattttgggtccttgtggttcattcctcgtcagtttctacctgagaaatactgctattatcggaggtttgctcaagatacaaatcatgccacagactgcgttatatgcatgacagccattgatctttctccgcgatctaatgattgcatggtgaccccttgtgatcattttttccactctggctgtttgcaaagatggatggatataaagatggagtgccctacttgccggggccctcttccacctgcataaagagatttctagtgttcatatcaagagaatcaactcaccctgcccaacaacataattttggttgggatagaatccatattccgtataattgcaccttcagtacaatactgaaatacgatacttctcacaattgtatcatgcagcattgttataattttagactctttttttcctctcctttttatttcactggttatgtatcaatatcaagttgtacattagaaattcaatatgatgatcttttgac

SEQ ID NO: 365 - DNA, 374 bp, Glycine max
  Clone ID: 2DC-01-Q1-B1-A1
aagaaacccaaatcccaaaactaaaaacctcaccctcatctttctctcaactcccttaaccaaaaccaatacaatggccacccaaagaagccatcattcccctatcttattttcgtccctcatcttaacccttttcgttctctacttcccaagatgccaccacgccattcccaacaaccccatcaaaaccgtcgtcgttttggtaatggaaaatcgctccttcgaccacatgctgggctggatgaagagactaaatccggccatcgatggcgtgaccgggtcggagtccaatccgctgtccgtgtccgacccagactcgaagcggttcttcttcagggaccgggcccatttcgtggacccggaccctggtcact

SEQ ID NO: 366 - DNA, 319 bp, Glycine max
  Clone ID: 2DC-01-Q1-B1-A10
cattctatcgcttcacacagagtgagatatagaatcactgaagagcttccttcaatggcggtttcttctctctctgttactcctctttcgcgctcaaattcttccccctctctatcttccaagccaaagtttccatctttgtgttttctctctggcaacaacaccacattgagggtaacatgcccaaaacctctgcactcatccactgttgttcatgttgctaccgaagcgttggattcatcccctgatcccttggacccacctccagaaacccttgatgatgactctgacgccaccacctttgaggttggtgacttgg

SEQ ID NO: 367 - DNA, 344 bp, Glycine max
  Clone ID: 2DC-01-Q1-B1-A11
ggagaagcttttggaaaggtgcgggctttatttgatgatggtggaaagcgggttgatgaagctacaccctctatacctgtacaggttattggattgaataatgttccaattgctggtgatgaatttgaggttattgaatcccttgatactgcacgtgaaagggcagaaactcgtgctgagtcattgcgtaatgagcgtatttcagcaaaggcaggggatggaaaggtcaccctttcttctttagcttcagcagtttcgtcaggaaagctgtctggactagatttgcatcaactaaatattattttgaaagttgatcttcagggatctattgaaactgtcagaaa

SEQ ID NO: 368 - DNA, 347 bp, Glycine max
  Clone ID: 2DC-01-Q1-B1-A12
gaagaagagagaggtctctcaacaatggccactgccactgtttcaatttcaactttatgcgctactttcggaacccattgcgccatttcccacaacccaaaacctctattttctcaacctttcaatctcaatcactttccttctaactcttacaagctcgctttctcgcctcgctcacctctttcaccccttcccaaggcctctgaatccgcggtagccgaaaccgaacccggttcggccgagcccgaaccggcccaaatttccccggcccaacctccctcctgggaacccggtctcttcgctgtcgtaatgattggcggacgccaatatattgttcacccggggcg

SEQ ID NO: 369 - DNA, 392 bp, Glycine max
  Clone ID: 2DC-01-Q1-B1-A2
aaaaaaaaaaaaaaaaaatccgcgattcgctcttctcttggaaaagtgaaaaccagaagtacgaacgaaagagaagagcgatttagaagtgagagaagatggggttgtcgttcacgaagctgttcagcaggttgtttgcgaagaaggaaatgaggattctgatggtaggtctcgatgctgctggtaagacaaccatcttgtacaagctcaagcttggagaaatcgtcaccactatccccaccatcggatttaatgttgagactgtggagtacaagaacatcagcttcactgtgtgggatgttggtggtcaggacaagatccgtccactgtggaggcattatttccagaacactcagggtctcatttttgtggttgatagcaatgatagagat

SEQ ID NO: 370 - DNA, 299 bp, Glycine max
  Clone ID: 2DC-01-Q1-B1-A3
aacagaaaacctcttcgaccgttacaaacagggttgggtttgatcccgtttccccccccaacatttacaagtttttaacgctgcttcttttgtttttttggttacctttccttctttctttctattccctgtaattccgttttttaagtctttttgtctttagtgtacatattccttctgtttagaaacacggtattggaagtaatacgtttctcgatgctcagaaaaaaacgaagaatagaatattctaataatcctttcgctgagctagcgtgtgattagaatttagattaattaag

SEQ ID NO: 371 - DNA, 324 bp, Glycine max
  Clone ID: 2DC-01-Q1-B1-A4
atgacaaaccattcatttgcacaatggatgccattggagcaaaggaacttgcaaaagattttgtagtggctggcactgcatccgagtctctttatggtgcttgtgagtcaatgtttaagcctgacatggaaccagaagaattgttcgagacaatctcccaagcactgctatcatctgtagatcgtgattgtttaagtggctggggtggacatgtttatgttgtcaccccaaccgaagtaaaggaaaggatactgaaaggaagaatggactaacttttaagcgtgtttgttttgacgtactcctactttccgaggagcctgaacg

SEQ ID NO: 372 - DNA, 393 bp, Glycine max
  Clone ID: 2DC-01-Q1-B1-A5
gtcttccatagccccccaaaaatgaagagcaccatcttctttgctctctttctcttttgtgccttcaccacctcatacctaccttcagccatcgctgatttcgtgctcgataatgaaggtaaccctcttgaaaatggtggcacatattatatcttgtcagacataacagcatttggtggaataagagcagccccaacgggaaatgaaagatgccctctcactgtggtgcaatctcgcaatgagctcgacaaagggattggaacaatcatctcgtccccatatcgaatccgttttatcgccgaaggccatcctttgagccttaagttcgattcatttgcagttataatgctgtgtgttggaatccctacgagtggtctgttgtggaggatctac

SEQ ID NO: 373 - DNA, 406 bp, Glycine max
  Clone ID: 2DC-01-Q1-B1-A6
gaaaaacaaaagagtagtggcctttaggtggtgaagaacaagagctcaaatcaaatcgaatcgaaaaaagaaagaaagatcatattcatggcgatggcaagcctggctcgacggaagggttacgccgtcgttttgtcgtcgaggtcgtcgttttgtctgacaagctggaggggattcgcgtccggatctgacgaaaacgacgtcgtcgtcatcggcggcggtcccggcggctacgtggccgccatcaaagccgcgcagctcggtctgaaaaccacttgcatcgaaaagcgtggcactctcggcggtacctgcctcaacgtcggatgcatcccttccaaggcacttctgcattcttcccacatgtatcatgaggctaaacatgcatttgccaaccatggggtcaagt

SEQ ID NO: 374 - DNA, 406 bp, Glycine max
  unsure (1)..(406): unsure at all n locations
  Clone ID: 2DC-01-Q1-B1-A7
gcatcctctgacaatgatgagaagaaaggtcaatattctaagttctggaatgagtttggtaaatccattaaacttggtatcatcgaggatgccaccaacagaaatcgtttggcaaaactgctcagatttgagagcaccaagtctgagggtaaattgacatctctggatcagtacatatctagaatgaaaactgggcagaaggatatcttttacataactggaaccagcaaagaacaactggaaaactctcccttccttgagcggcttaagaagaaaaattttgaggttattttcttcacggatccagttgatgagtacttgatgcaatacctgatggattatgaagacaagaagttccaaaatgtgtccaagganggtttgaaacttgggaaagatcanaagacaa

SEQ ID NO: 375 - DNA, 401 bp, Glycine max
  Clone ID: 2DC-01-Q1-B1-A8
caacaacaaacccatttccatttctgctgtttttctcaaaccaacaactctgtcgtcgtctcgcttcgttccccacgtcgtggtgtcgtcggatttggggcaggaggaggacaccttcagtgacggagacggccccagcttctcccccgaccttaagctctttgtcgggaatcttccgttcaacgtcgacagcgcgcagctcgcggagctctttgagagtgccgggaatgtggatgtggttgaggtgatttatgataagactactgggaggagcagggggtttgggtttgtcaccatgtcttcggttgaggaagctgaagcggctgctcagcagttcaatggctatgaacttgatggaagagcattgagagtgaattctgggccacctcctgctcggaatg

SEQ ID NO: 376 - DNA, 355 bp, Glycine max
  Clone ID: 2DC-01-Q1-B1-A9
gcagcggcggcaacagggagagaagatgaagttcaatccacgtgtgtcgagcagccgccgcaagagccgaaaggctcatttcacggcgccgtcgagcgtgcggcgggtgcttatgagcgcccctctgtcggcggagctgcggtccaagtacaacgtgaggtcgatcccagtacggaaggaggacgaggtgcaggtggtgcgaggaacatacaagggtcgcgaggggaaggtgactcaggtctaccgtcgaaagtgggtgattcacattgagcgcataacccgcgagaaggtgaatggttccaccgtcaacgttgggattcaaccctccaaggttgtgctgaccaagctcaaattg

SEQ ID NO: 377 - DNA, 346 bp, Glycine max
  Clone ID: 2DC-01-Q1-B1-B1
ggttactcactgtggttggaacacggtggtggaaagcgtgaacgcggggttgccgatggcgacgtggcctctgtttgcggagcattttttcaacgagaagctggtggtggatgtgttgaagattggggtgccggtgggggcgaaagagtggaggaactggaacgagtttgggagtgaggtggtgaaacgggaggagattggaaacgcgattgcttcgttgatgagtgaggaagaagaagatggaggaatgaggaagagagccaaggagctaagcgttgcggcgaagagtgctataaaggttggtggatcttcgcacaacaacatgaacgaattgattcgggagctc

SEQ ID NO: 378 - DNA, 195 bp, Glycine max
  Clone ID: 2DC-01-Q1-B1-B10
gtgacaacatcacaaccaccacgacaatatcatttaaggaagtcaaactacgacaacgatgacaccaccaaaaacaactcttccttccaaagcgaaaatgacgacaacacatccacaatcgacaacaattaccacgaaaacaacacacccttccaaaccaacaacgactacatcaacctccccttctcacattgg

SEQ ID NO: 379 - DNA, 418 bp, Glycine max
  unsure (1)..(418): unsure at all n locations
  Clone ID: 2DC-01-Q1-B1-B11
gtgattgttgtgactcgttcttcttcgtcgttatcttcttcttttgttgtttgtgtgtttgttttttctctcacctgaaaatgtcttgctgcggtggtaactgtggttgcggaagcgcctgcaagtgcggcaacggctgcggaggctgcaagatgtacccagacttgagctacaccgagtcaaccaccaccgagaccttggtcatgggagtggcaccagttaaggctcaattcgagagtgctgaaatgggtgttcccgctgagaacgatggctgcaaatgtggagctaactgcacctgcaacccctgcacttgcaagtgaggtgttggagagctaaagcttcaagcagaaatggcccttagaaataatgataaaaactatatgtagtttcaaaacttcanaattatgtagtatgtatt

SEQ ID NO: 380 - DNA, 374 bp, Glycine max
  unsure (1)..(374): unsure at all n locations
  Clone ID: 2DC-01-Q1-B1-B12
gtggcagccttatatttttgcaacccgattctaccaagaaaggggttatacttctcgacggtaccaataagttgtgggctcttcccagtgaaaacggtaggttgtcgtgggaggaaggagttttggacttggagagtgcggcaatgcacgagatagggcatttactagggcttgaccactctaacaaagaggactctgttatgtacccttgcatattgccttcacaccaacgaaaggtgcagctctcgaaatctgataagaccaacgttcagcatcagtttgctaacgtagaggactctgcaggccacgtanggcgtttgggagtgagtttaattaccactttgtctcttggattcgcttacttacttctcctt

SEQ ID NO: 381 - DNA, 373 bp, Glycine max
  Clone ID: 2DC-01-Q1-B1-B2
gtgattgttgtgactcgttcttcttcgtcgttatcttcttcttttgttgtttgtgtgtttgttttttctctcacctgaaaatgtcttgctgcggtggtaactgtggttgcggaagcgcctgcaagtgcggcaacggctgcggaggctgcaagatgtacccagacttgagctacaccgagtcaaccaccaccgagaccttggtcatgggagtggcaccagttaaggctcaattcgagagtgctgaaatgggtgttcccgctgagaacgatggctgcaaatgtggagctaactgcacctgcaacccctgcacttgcaagtgaggtgttggagagctaaagcttcagcaaaattggccctaaaaaataatgataaa

SEQ ID NO: 382 - DNA, 408 bp, Glycine max
  Clone ID: 2DC-01-Q1-B1-B3
aagagttggttgccacctgcttagtaaaagatccaaaaaagcgtccaagttcagaaaagcttttaaaacaccacttctttaaacaagcacgtgccagcaaatatctagctcgcaccattttagaaggccttgctcctttaggagatcgttttagattgctgaaggctaaacaggcagatttattggtgcagaacaaggctctttacgaggataaggatcaattatctcagaaagaatatattcgaggaattagtgcctggaattttaacctggaggatttgaaaagtcaagctgctcttattcaagatgatgacatacctaatgcagaagagtcacaaagggataagaagcaaaaagacagattggacgacttcaaagtttctgcagagaggctatcacctggagcag

SEQ ID NO: 383 - DNA, 403 bp, Glycine max
  Clone ID: 2DC-01-Q1-B1-B4
gtgattgttgtgactcgttcttcttcgtcgttatcttcttcttttgttgtttgtgtgtttgttttttctctcacctgaaaatgtcttgctgcggtggtaactgtggttgcggaagcgcctgcaagtgcggcaacggctgcggaggctgcaagatgtacccagacttgagctacaccgagtcaaccaccaccgagaccttggtcatgggagtggcaccagttaaggctcaattcgagagtgctgaaatgggtgttcccgctgagaacgatggctgcaaatgtggagctaactgcacctgcaacccctgcacttgcaagtgaggtgttggagagctaaagcttcaagcagaaatggcccttagaaataatgataaaaactatatgttagttcaaaacttcaaaat

SEQ ID NO: 384 - DNA, 401 bp, Glycine max
  Clone ID: 2DC-01-Q1-B1-B5
acactctcccctctccattcaccattactcccctcttcttccacttttgctcttcccaccacctctgcttcaagagcaaacgtgattctgcccccgaagcccttgaatggagttcgaatctcgacacccaaaaggaggactgagtcggtgattgtctccgcctcctccggcggagagcgagaaagagagcggcgcctccgtggagaagcttccgttggagtcgaaggtgaaggagagagaggagcaaaagctgaggatgaagctggcgaagaagataaggttgaggcggaaaaggcttcttcggaaacgcaagttgagaaagaagggtagatggccaccttctaagatgaagaagttgaagaatgtatgattgtcaatttcaatgtgctttttttttttgc

SEQ ID NO: 385 - DNA, 405 bp, Glycine max
  Clone ID: 2DC-01-Q1-B1-B7
cagacacaacacaacaaggttgcaaagtgaagaaggattaagccatgaaagctctaattttaatcctcacgctatgcatcattgctgtcaccttctcatcacaagcagcaacctccatagtcactcaaccccaacccaacgaatttttcaagctcaaccaaaccaagccacagaatgatggtagttcctgtagttacacggtgagcataaaaacaagctgcagttctccctcctacaccagagattacatcggtcttgcatttggtgatgcttatggctatcaggtttatgttccaagactggatgatcctggttcaggtacattcgagcggtgctctacggatacatttgagatatacggtccatgtacgtaccagacatgttatctgtatctataccggagtg

SEQ ID NO: 386 - DNA, 349 bp, Glycine max
  Clone ID: 2DC-01-Q1-B1-B8
aggggatgagctccatgagtttcaagctcaaggagttcttccagcctgggcccaatcaggccgacaagcttgtggaggacgctacttccgaggccctggacgagcccgaatgggccctcaatctcgatctctgcgacctcgtcaacaccgacaagctcaactgcgtcgaactcgtccgcggaatcaagaagcggatcattctcaagagccctagggttcagtacctcgcccttgtcctcctcgaaaccctagtcaagaactgcgagaaggccttctccgaggtcgccgccgagcgtgtcctcgacgagatggtcaagctcatcgacgaaccccagaccgtcgttaatac

SEQ ID NO: 387 - DNA, 348 bp, Glycine max
  Clone ID: 2DC-01-Q1-B1-B9
ctccgcaattatcatgggcaaggtcaagatcggaatcaacggatttggaagaattggccgtttggtagccagagtggctctgcagagagacgatgttgaactcgttgccgttaacgaccctttcatcaccaccgattacatgacatacatgtttaaatacgacagtgttcatggacactggaagcatcacgatgtcaccgttaaggacgagaagacccttctcttcggtgacaagccagtcactatttttggacacagaaaccctgaagagatccatgggggtcaactggagctgacatcattgttgagtccaccggagttttcaccgataaggacaaggcgccgcac

SEQ ID NO: 388 - DNA, 314 bp, Glycine max
  Clone ID: 2DC-01-Q1-B1-C1
ctggagcggacaggacattacttgacagtgaaagacaaccaggtggtgcacttgcatccatcaaattgcctggaccacaagccggagtgggtaatatataatgaatatgttcttactagtcggaattttattcgaactgtgacagatatacgtggagaatggttagtggatgtagccccacattactatgatttgtcgaattttccacaatgtgaagctaagcgtgttcttgagaggctttacaagaagcgagagaaggaaaaggaggaagccaggagtcgtaaatgaagtcccctacatccatgccttttttt

SEQ ID NO: 389 - DNA, 297 bp, Glycine max
  Clone ID: 2DC-01-Q1-B1-C10
ggcaacccaagcctctctcttaaccccacccctctccggtctcaaagccagcgaccgcgcctccgtgccatggaagcaaaactccagcctctccttctccagcccgaagcccctcaagttctccagaacaatcagagcagcagccgccgacgagaccacagaggcaccagcaaaagtagaggctgcaccggtcgggttcaccccaccagaacttgacccaaacaccccttccccgatcttcgggggcagcaccggcgggctcctgcgcaaggcacaggtggaggagttttatgtcat

SEQ ID NO: 390 - DNA, 330 bp, Glycine max
  Clone ID: 2DC-01-Q1-B1-C11
gtgaattgcggtttcaattcagagccacttcatctcaggtgtttgaagttgagataaaatgagtggcacatacaaagcaggatcaggaaccacgaaaacccctgccgagtttctcaaatccattcgggggaggccggttgttgtcaagctcaattctggtgttgattacagaggtatacttgcttgtctacatggctatatgaatattgcaatggaccacacagaggaatacgtcaatggacaattgaagaacaactatggtgacgccttcatccgagggaataatgttctatacattactacctcacagaggactctaacacacggggc

SEQ ID NO: 391 - DNA, 373 bp, Glycine max
  Clone ID: 2DC-01-Q1-B1-C12
tcggggaattccaattccacattttcaagaaataaggaggcaaaaatgttcatatatgaattggaattatttgttttcttattaggcctatcctgaagccagaggaaatgagatcggaattcctcggggaattccaattccacattttcaagaaataaggaggcaaaaatgttcatatatgaattggaattatttgttttcttattaggcctatcctgaagccaaaggaaatgagatcggaattcctcggggaattccaattccacattttcaagaaataaggaggcaaaaatgttcatatatgaattggaattatttgttttcttattaggcctatcctgaagccaaaggaaatgagatcggaattcctcgg

SEQ ID NO: 392 - DNA, 358 bp, Glycine max
  Clone ID: 2DC-01-Q1-B1-C2
caaacttggtcacctcgagttcactatccttagccaacactgcacccatgttcccaccaaagttgccttcgtgggctcggggccccttcctcttacctcaattgtgttggcatcgaaccacttaccttccaccactttccacaactatgacatggaccctttagccaattccaacgctatgcgcttggtttcctctgaccctgacttgtccaagcgcatgtttttccacaccaacgacatattggaagtgtcgaacgctttgaaggagtacgaggttgtttacttggcagcacttgtgggcatggacaaggaggggaagaatcgaatcattgatcacttgggcaagcacatgaaccct

SEQ ID NO: 393 - DNA, 393 bp, Glycine max
  Clone ID: 2DC-01-Q1-B1-C3
ccgccacttctgaatctattgaatcaacaatcatgtcggacgaagagcaccatttcgagtccaaggccgacgccggagcctccaaaacctaccctcagcaagccggtaccatccgcaagaacggctacatcgtcatcaaaggccgcccctgcaaggttgtggaagtttcgacttccaaaactggaaagcacggtcacgctaagtgtcactttgttggaattgatattttcactgccaagaaacttgaggatattgtgccctcttctcacaactgtgatgttcctcatgtgaatcgtactgattaccagctcattgatattgctgaggatggatttttgagtctgcttactgaaaatggtaacactaaggatgacctcaagcctcccactgatg

SEQ ID NO: 394 - DNA, 306 bp, Glycine max
  Clone ID: 2DC-01-Q1-B1-C4
gtccaaccacgcttttctctacagtcatgggcaaggtcaagatcggaatcaacggatttggaagaattggccgtttggttgccagagtcgctctgcaaagagacgatgtggagctcgttgccgttaacgaccctttcattaccaccgattacatgacatacatgtttaaatacgacagtgttcacggacactggaagcatcacgatgtcaccgttaaggacgagaagacccttctcttcggtgacaagccagtcactgtttttggacacaggaaccctgaagagatcccatgggggtcaactggag

SEQ ID NO: 395 - DNA, 401 bp, Glycine max
  Clone ID: 2DC-01-Q1-B1-C5
ggaagggttagcatgaggaaaacagcctccaagactgtttcttctggaagcccatggtacggcccagaccgtgtcaagtacttgggcccattctctggtgagcccccatcctacctcactggtgaattcccaggtgactatggttgggacactgctgggctttctgctgacccagagacctttgccaagaaccgtgaacttgaagttatccactccagatgggccatgttgggagccctgggctgtgttttccctgaactcttggcccgcaacggtgtcaagttcggtgaagccgtgtggttcaaggccgggtctcaaatatttagtgagggtgggcttgactacttgggcaacccaagcctgattcatgcacaaagcatccttgccatctgggccactca

SEQ ID NO: 396 - DNA, 366 bp, Glycine max
  Clone ID: 2DC-01-Q1-B1-C6
cactctcctccgctctcaactctctctcctccccctccctctctctctccttctccacctcctcccgccgcttctctctcctccctccaccctcacaccaaccctccaaacccctcttcctcaccctcaaatccaaaccctccgacgacattgacacatcgttcttcgacaacatcaacccgcaagacgacatcacattcaatcccccggagcccccggaagggttcgtggcgcctccctccttcgacgacggccctctggagaccgaggacgaaatcgccgccgcctacgaagagctctacggccccggctacagcggtgtcccggtcctcggcaacgacgtgtaacttatggacgcgaaagtga

SEQ ID NO: 397 - DNA, 383 bp, Glycine max
  Clone ID: 2DC-01-Q1-B1-C7
aaaaccctaattcccaccgcaaggtaaaaaaaaaaaaaaaaaccagtggtgcgcgatgccaccgaagttcgatcccttgcaggtggtggacgtgttcgtccgagtcaccggcggcgaggtcggcgcggcgagttccctcgctccaaagatcggtccattgggtctctccccaaagaagatcggagaagacattgcgaaggaaaccgcgaaggactggaagggcctccgcgtgacggtgaagctgacagtacagaaccggcaggcgaaggtgacggtggtgccctccgccgccgcgcctttcatcaaggcgctgaaggagcctgagagggacaggaagaagacgaagaacatcaagcacagcgggaacatctccctagacgacg

SEQ ID NO: 398 - DNA, 331 bp, Glycine max
  Clone ID: 2DC-01-Q1-B1-C8
gccatggcagcagcagcgtcaatgtgtatgagcttcaacctggcaacagcattcaagggtctctctttttcttcttcttcctcatcgttcttcgctggaagtggtagttattctctccgcgcgggtcccacctcggtggtgtcgctgctccggcgctgcccgctgaccatagagaacgcccacaagaagggggcgggcagcaccaagaacggccgcgactcgcagggcaagcgtctcggagtcaagatatacggcgaccaggtcgccaagcccggctccatcatcgtccgccagcgcggaaccaagtttcatgcaggaaagaatgtggggc

SEQ ID NO: 399 - DNA, 392 bp, Glycine max
  Clone ID: 2DC-01-Q1-B1-C9
aaaaacaatggcatcatttccaatcccacagctcctaccatctcacaccaaccactccttaacttgtttcagtagtaacactaacactctgccgttgtcatcctcactgttgcgccgtcgccggagtctcgactctctccgatgctcggcgtcgtcggagaagcagccccacgacgacgcgctggagctccctctcttcactctccctttggtcctcttccccggtgcgatcctccccctccagatcttcgagttccgctaccgcatcatgatgcacacgctcatccataccgacctccgcatcggcgtcatctacaacgacgccgtctcgggcaccgccgaggtcggctgcctgggcgatgtcgtcaaacacgagcgcctcgttgacgaca

SEQ ID NO: 400 - DNA, 336 bp, Glycine max
  Clone ID: 2DC-01-Q1-B1-D1
cacacacacctcagcagaagcaacacagtgggcaatggccgagctcctcaaccaccctgaagcatttcaaaaggtgagaaaggagatagagttagtcactggcaatgttaggcttgttgatgaatccgatatcacaaacttgccatatttgcaagcagttgtgaaggaaacactaagactctacccgccggcaccaatcacgacaagagagtgtcgccaacactgcaaaataaacagcttcgatgtgccaccaaagacagcagtggcaatcaatttgtatgccataatgagagaccctgattcttgggacaatccaaatgagttttgccctgaaaa

SEQ ID NO: 401 - DNA, 423 bp, Glycine max
  Clone ID: 2DC-01-Q1-B1-D10
ctcgagccggttgagggaaaatgggcacttgtgggattgtcttgttgaccaaaccttcccctaagccatggccacttcggacatcctcacgacgcactcttccccgcattcgctgctgctctgcttcttctacttcagagctttccccagataagcttccaactagtattgatttgtctgtaactggtggtgcctatgatttctcaaaagcaacaacatcactaacaaatgagttaatctcttcaccaaagaaagtgactcttttaaggcacggtcttagcacttggaattcagaaagtaggattcagggaagctcagatttgtctgtattaactgaagttggggaagagcaagcaaaaaggtgcaaaaaagccttggaaaatatatactttgaccagtgttttgcaagtccaatatctcgtg

SEQ ID NO: 402 - DNA, 424 bp, Glycine max
  unsure (1)..(424): unsure at all n locations
  Clone ID: 2DC-01-Q1-B1-D11
gcagagcaacaggagttgtttaagaagcacatcgagggagcaactaaatacctgctctctaagattaaagatttccaattttttgttggtgagagcatgggtgatgatgcttgcttggtctttgcctactacaaggacggcgctgctgatccaacattcctgtactttgcatatgccttaaaggaggtcaagtgctaagtgacttaatgtaccgagctatctactcattttatctagttttttttacgttctgtcctaagttacttgaaactttgacctggtattttgattttaatggtgagacgtgtgctactgctacatcataattcccatcanatttaattatcgatggggtagaaattcaataaattatgattttgggccgtgctagattcccggaagtttcttttgaagaaatttttgg

SEQ ID NO: 403 - DNA, 347 bp, Glycine max
  Clone ID: 2DC-01-Q1-B1-D12
aacatatctcatttatagtttactattgaaagatgggtttgaaaatggcaatactgatcctaggcctgctggccatgttccttttggtctcctcagaggtggcatccacgaattcaaaagaggtgacaaatggagttgaagatgccaaatatcctggtggaggctatggtgggggttacccaggcaatggcggtggtggctatcctggccgtggtggtggctaccctggtcgtggtggtggctatccaggtcgcggtggtggttaccctggtcgtggtggcggctatccaggccgtggaggagggtattgtcgctatggctgttgcggtggccggacatacaatgga

SEQ ID NO: 404 - DNA, 369 bp, Glycine max
  unsure (1)..(369): unsure at all n locations
  Clone ID: 2DC-01-Q1-B1-D2
gggtgaggtagaacccttccactgtggtgactctgcgatgggtgcctacaagtatgtttcagagctatggcgcaagaagcagtctgatgtcatgcgcttcttgcagcgggtgaggtgctgggagtataggcagcaaccttccattgttcgtttgacaaggtctacccgccctgacaaggctcgtcgcttgggcttcaaggctaagcagggctatgtgatttaccgtgttcgtgttaggaggggtggccgaaagagaccagttcccaaaggtattgtttatgggaagcccacanaccagggagttacccaactgaaatttcagcgaagcaagaggtcagttgccgaagagcgagctggacggaagctggg

SEQ ID NO: 405 - DNA, 406 bp, Glycine max
  Clone ID: 2DC-01-Q1-B1-D3
cctatttacctcagagtcggtgaacgagggacaccctgacaagctctgcgaccaaatctccgatgctgtcctcgacgcttgcctcgagcaggacccagacagcaaagttgcctgcgaaacatgcaccaaaaccaacttggtcatggtcttcggagaaatcacgaccaaggccaacgttgactacgagaagatagtgcgtgacacctgcaggaacatcggcttcgtctcaaatgatgtgggactggatgccgacaactgcaaggtcctcgtcaacattgagcagcagagccctgatattgctcagggtgtacacggccaccttaccaaaaaacctgaagaaattggtgctggtgaccaaggtcacatgtttggctatgccactgatgaaacccctgaattgatgcca

SEQ ID NO: 406 - DNA, 327 bp, Glycine max
  Clone ID: 2DC-01-Q1-B1-D4
gcagctaccatgaatatgtgttctaaatgccacaaagacatgttgctgaaacaggagcaggccaagcttgcagcatcatccattgggaatattatgaatgggtcttcaagcagcactgaaaaggaacctgttgttgccgctgctgctgctaatgttgatatcccagttattccagtagagcctaaaactgtctctgtgcaacctttatttggttcaggtccagaagggagtggtgaggcaaagctgaaggatggaccaaaacgctgcagcagctgcaacaagcgatttggtttgacagggtttaatttgtcaagttggtgacttttt

SEQ ID NO: 407 - DNA, 399 bp, Glycine max
  Clone ID: 2DC-01-Q1-B1-D5
atacattttagttatctgaagatcgatgctttgaagggacattttatgaataaaaaagtttctatcgcttcctattttacaaagttggtttgaacttaaattgttattttactgcatatctttcattttagaggtcatgaactcatgatgttcatttcaaaaagatttacgatatttttatactagatttgagatatttgtgtacctaaagtcttaacaatccttgcattaacatttctttttcttttttttgtttctttaatagatttccttcagatttgttgacacagctgaagacagattgtctcgtcctgcacaatcatcgttatgccatatccccacgcaagcttcaatataataccaagttatctgacttttttgagattctggcaacatctg

SEQ ID NO: 408 - DNA, 403 bp, Glycine max
  Clone ID: 2DC-01-Q1-B1-D6
gggtttttgtgatctgcaagctacgatgggtaagggaacggggagtttcggtaagagaaggaacaagacccacaccctctgtgtgaggtgtggccgccgcagtttccacctccagaagagtcgttgcgccgcgtgcgctttccccgctgcgcgcaccaggaaatataactggagcgtgaaggccattaggagaaagaccaccggaactggaaggatgaggtacttgcgtaacgtgccccgtagatttaagagtggcttcagagacggtaccgaagctgcacccaggaagagaggagctgctgcctctacctaagctttgaataatagcaatttttgctgggtcagtgaattatataggatttaatgtttctatgttgatgccgagctctttggaacacgtttc

SEQ ID NO: 409 - DNA, 396 bp, Glycine max
  Clone ID: 2DC-01-Q1-B1-D7
gtcgaacttgcgtcccttcaaacatcgtttctgactctggatgaggccatcaagaccacgaatcgtagggttaacgctctggaaaacgtggtgaagccgcggttggagaacacgattagttacatcaagggagagctggacgagctggagagggaggatttcttcaggctgaagaagattcaggggtataagaagagggagattgagaggcagatgctgcagcagaacaactccaagcttgacactaatctccctttgcgcaaaggtctttcctacaattctgctcacaacttgttgtctgtgggtgacaaagatgaggatatcattttctgaatgtgctgctgctgctgctgctgatgggtgagactgagactactctgctattgtttaggtctc

SEQ ID NO: 410 - DNA, 377 bp, Glycine max
  Clone ID: 2DC-01-Q1-B1-D8
ctctcatctttcaatttcaatcaacggttatacccttttctatttgagcatcatcatgtccaccgcagcgcagcccaaggccaagaaaacggcgtcgtccaagaagcccctctcccatcctaccttcgccgcgatgatagcggaggcgatagcgagtctgaaggagagaaccggttcgagccaatacgcgataaccaaattcatcgaaggcaagcacaaggagttgcctccaacctacaagaagcttgttctcgttcatctcaagaagtctgttgctgctggcaagctcgttaaggtcaaaaactctttcaagctcgcaccgactaagtctgctcctgttaaagccgctgctgctcccaagaagcccaccaaagctg

SEQ ID NO: 411 - DNA, 201 bp, Glycine max
  Clone ID: 2DC-01-Q1-B1-D9
gcatgataaataagagaactgatgtcacattcaagagagtggggggtgcatgcatattatacctagggagaaactccattttgcattcaatttgcaacacttgtaaaagtattacaagagaagtaaaattgttcccaccattaaaagaatttctacaaccaactaaggagtactaaattttaagaatatgtcagaaatttg

SEQ ID NO: 412 - DNA, 390 bp, Glycine max
  Clone ID: 2DC-01-Q1-B1-E1
cagagaaataccagtcacacttcagtgaatacatcaagcgtgggatagaagctgatggtattgaggcactgtataagaaggttcatgccgccattcgtgctgatcctactcttaagaaatctgataagcagcccccgaaggagcacaagaggtacaacttgaagaagctgacttatgaggagaggaaggctaagttgattgcacgtgtggcgtctctcaactctgctgctgataacgatgaagatgatgagtgaaagttcattcaagattccgtatcatcgttgcacaactagaaactatcttattttgcgtctaaggaatcattttcttgaaaatttatttacatgtactgtttattttctaggtccgaaattttggatactatttttg

SEQ ID NO: 413 - DNA, 339 bp, Glycine max
  Clone ID: 2DC-01-Q1-B1-E10
actgaatctgccacaccacaatacaccacacagttccctcacttctctccttttgaccattcaaccttcgcctttgcctcctttccgtgactgagatggctggaggtgttattcagcagatattgaggaggaaactacaccctcggtttactaactctcccttgttgtcacccatcgtagccaagaaagatgatgctggctcttctggcagtcagtccttaagagcacttgcattaattggagctggtttatcaggccttttcagtttttcaacaatggcagcagctgatgaagctgagcatggcctggcatgtccaagctatccgtggcctcacaaag

SEQ ID NO: 414 - DNA, 401 bp, Glycine max
  unsure (1)..(401): unsure at all n locations
  Clone ID: 2DC-01-Q1-B1-E11
ctacgacgtcgtattcttccgcaatcgccgcctcgtccgataccctagccaaacctgcttccaccagaacattctccgccaccaacctcgcccttcaatcgtcgtcttccaagctcggtttcaaatccctaaagcttcaccgatgcgccgccgccgccggctccgccctcggcgcgcggatggtgtcggcgccggcggtcaaggcccccgcactgctcgatttcgacacgaaggttttcaagaaggagaagattaacctcgctggacacgatgagtacatcgtaaaaggaggcagggatttgtttcacttgttgcccgatgctttcaagggtatcaagcagattggtgttatcggttggggatctcangggactgctcaggctcagaatctacgggactct

SEQ ID NO: 415 - DNA, 407 bp, Glycine max
  unsure (1)..(407): unsure at all n locations
  Clone ID: 2DC-01-Q1-B1-E12
ggaagaagaggttttcgtttggttaagcaagatggatttggaagcagagaaagagcatgaagctgcatttgcagtggcctcactctccctctctctccccaccattttccccttcgtccaacccaagaatatcccatcaaccacccttcaaccaaccaagctcaaagtcccaacccaagcctcatccctcacacacctttctctctccaccaccactcctcctccttccaaaacctccttcaaatccaccgtctccgccaaccccctccacgcccctctctccctcgctccccaccgcccccgcgacccttccaacgccgccgccctccgccgcgccgccgtcgtctggttccgcaacgacctccgcctcctcgacaatgagtgccntcacgccggcaacaacgact

SEQ ID NO: 416 - DNA, 405 bp, Glycine max
  Clone ID: 2DC-01-Q1-B1-E2
gattgtttgttgttgtaactcgttcttcttcttttgttgttctgtgtttgtgtttgttttttctctcacctgaaaatgtcttgctgcggtggtaactgtggttgcggaagctcctgcaagtgcggcaacggctgcggaggctgcaagatgtacccagacttgagctacactgagtcaaccaccaccgagaccttggtcatgggagtggcacctgttaaggctcaatttgagggtgctgaaatgggtgtgcccgctgagaacgatggctgcaaatgtggaccaaactgctcctgcaacccctgcacttgcaagtgaggtgttgggagagcaagcttcaagcagagatagcccttaattaggaataatgataaactattaatgtgtagctaaaaacttatgtattat

SEQ ID NO: 417 - DNA, 340 bp, Glycine max
  Clone ID: 2DC-01-Q1-B1-E3
gcagtttcgtgctttcccgccgccgctacactgccaccgtcttccccgccgtctccgccagagatggcagaagaggattcaaagcctctgaactacatctccgaggtcattctcaagaagaggaagaacaccgaagcatgggctttaaggaaaaaagaacagttccagcaaaagaaataccaatccatcaagaagccggaggatttcatccacgagtatcgcaacaaggaagtggaccttataagaatgaagcggagggtgaagaggaaagtgcctgaagctaactccaacactctaataatcattcggattcaggggaaaaaggacatgcatccgagga

SEQ ID NO: 418 - DNA, 402 bp, Glycine max
  Clone ID: 2DC-01-Q1-B1-E4
ctctctttcttttcttctcgcagagcgaaatcccaatcccacacaaatggcatgctcagccacctctgcttctctcttctccgcaaaccccacacctctcttctctcccaaatcctccctctccctccctaacaactctctccacctcaaccctctccccacgcgcccttctctctccctcacgcgcccctcgcacactcgccgctccttcgtcgtcaaagcctcctccagcgagcttccgctagttggaaacaccgcaccggatttcgaagcagaggctgtgtttgaccaggagtttatcaacgtgaaactatctgattacatttggaagaaatatgttgttctcttcttctacccgttggacttcacttttgtttgtcccacagaaatcactgctttcag

SEQ ID NO: 419 - DNA, 365 bp, Glycine max
  Clone ID: 2DC-01-Q1-B1-E5
atttttcactcagattaaaggcactgtgttctacacagatgccaatggagcagttgttgatatcactgccaagtcttcggcatatttgccactgcaagaggcgtgcattcacagagttaagcatgtagaagaagcgggcttagtctgggttcaaagaggagtttttgatcgttggtgagaactcagtggatgatagcttggtcttgagtttaagggctcttcagtttgaccttgcatgggaacgatgtagacagcttcaagcagaagatgttactgtcaagggtaagattgtggggggtaacaaagggcggagtggtggctgatttggaagggcttagaggatttgttccattgtcacaaatatc

SEQ ID NO: 420 - DNA, 371 bp, Glycine max
  Clone ID: 2DC-01-Q1-B1-E6
ctagcaacggcatcatttttttgttcttctccaatgtttactcttcgatcctattacctatctacgaatctaacgcctccgacggcccttcgttgacattgaggcagggaaaagtcgtggagaagaacgacacagacgaagaagccactgatactgaaaatggtcgcgattctcgatgacaatcaaaactcatacgccacgcacaactgaaatcgccttctcacttcgacttctcgccgcacctcgccttcgccaacagcatcgtctccttcgactccaccttcgcgtcgtctcatgagcgcgccatgtgcctcaacttcttgtagattaatatgaaatcctaggctacgaatacgcgaataaagcatgaa

SEQ ID NO: 421 - DNA, 350 bp, Glycine max
  unsure (1)..(350): unsure at all n locations
  Clone ID: 2DC-01-Q1-B1-E7
gtgtgcagaagagcgtcgcagttgtaaccctaatcagaagaagcgcagcttcaagcgagtgacagccaccagccatgggtcgtatgcacagccgcggtaagggtatatcctcttctgctttgccctacaaaaggacacctcctagctggctcaagatctcttcgcaagatgtcgaagaaaatatctgcaagtttgcgaagaaaggtttgaccccgtctcagattggtgtcattctcagagattctcacggtattgctcaggtcaatancgtcactggcagcaaaatccttcgcatcctcaaagctcacggacttgcgcctgaaattccagaggatctgtaccatttgatt

SEQ ID NO: 422 - DNA, 325 bp, Glycine max
  Clone ID: 2DC-01-Q1-B1-E8
cagagagtgatttcagtgaatgatcggtgttcacctgatcacaccataatcgtcaccgtcaattgaagaagatgccgatcagaagcatcgccgtcggaaggcctgaacaggctactcacccggacacgttgagagcggccttggctgtgttcatctcacccttcatcatcgcgttcgccggctcaggctccgggatcgcctacagcaggctcagtgacaacggcgctgccatcccagccggcctcatcgccgccgccatcgcccatgcattcaccgtcatcgtcgccgtctccagtcggcgccaacatctccggtggccacgtca

SEQ ID NO: 423 - DNA, 416 bp, Glycine max
  unsure (1)..(416): unsure at all n locations
  Clone ID: 2DC-01-Q1-B1-E9
gcaagcaaggtagcgtcttgaagagtttcaaagccaaaataatgtgttatagggtggactgtaaaacctgtgggaagtatacatgggggggatgtggtgatcacttgaccaccctctacgccagcattgatgagggaatgcactgtacgtgccgctcctggccgggtgttgttacacgcacacgcacaaccaccactcagcaacctactcaatccaataatcccaaccaagggaataggaattctcaaaattaacgaagctgcgttggattctgatacgcagcagttcttttcgggttatatgacacgcagagggatagagatcggtactgtcggggtactagtgtatgttaaaagtgttaanggggttgatattaataatgtaatgtagggatggtcatgtgaaactgaacaacg

SEQ ID NO: 424 - DNA, 310 bp, Glycine max
  Clone ID: 2DC-01-Q1-B1-F1
aagaaaagctaaaatgcttaacttctcaattgcatatgggaagactcctgtggggctttccaaggattggaaggtttctgtgaaagaagctaagaaaacagttgacctttggtacaatgatagaaaagaggttttgcaatggcaagaggagcgtaaaaaggaagctcgtgtgttacattgtgtttacacattgctagggcgagctcggcggttccctttgatggcccaagctaacacctatcaaaaaggtcatattgagcgagctgctattaatactccagtgcagggtagtgcagctgatgtttgcatg

SEQ ID NO: 425 - DNA, 394 bp, Glycine max
  Clone ID: 2DC-01-Q1-B1-F10
gtcccaaagagctaacaagagattcaagaccggcatggctaatgaagaggaacagaaaaaccacctcttcggcatcaaagatctcggtcacaagactctccttcagagtgatgcactctatcagtatatacttgaaaccagtgtctatccaagagagcacgagtgcttgaaagagatacgcaagatgactgcaaaacacccactgaacatcatggcaacaccagcagacgaaggacaacttctgagcatgcttgttaagctcacgaattcaaagaacgccttggaaattggtgtattcactggttactctctgctctccactgccctggctcttccccctgatggaaagatcttggctttggatgtgaatcgcgaatactatgagttaggattg

SEQ ID NO: 426 - DNA, 374 bp, Glycine max
  Clone ID: 2DC-01-Q1-B1-F11
cacacatttcgtcggaatgggaagggtgattcgcgcacagcgtaagggtgcggggtcggtgttcaagtcccacacccaccaccgcaagggtccggcgaggttccgcagcctcgacttcggcgagcgcaacggctacctcaaaggggtcgtcaccgatatcatccacgaccctggtcgcggtgctcctctagccaaggtggcgttccgccaccccttccgctacaagaagcagatggagctcttcgtcgccgccgagggcctctacaccggccagttcatctactgcggcaagaaggccaccctcgtcgtcggcaacgtcttgcccctccgattcatccccgaaggtgccgttatctgcaacgtcgagcaacacg

SEQ ID NO: 427 - DNA, 377 bp, Glycine max
  Clone ID: 2DC-01-Q1-B1-F12
gtgactcgttcttcttcgtcgttatcttcttcttttgttgtttgtgtgtttgttttttctctcacctgaaaatgtcttgctgcggtggtaactgtggttgcggaagcgcctgcaagtgcggcaacggctgcggaggctgcaagatgtacccagacttgagctacaccgagtcaaccaccaccgagaccttggtcatgggagtggcaccagttaaggctcaattcgagagtgctgaaatgggtgttcccgctgagaacgatggctgcaaatgtggagctaactgcacctgcaacccctgcacttgcaagtgaggtgttggagagctaaagcttcaagcagaaatggcccttagaaataatgataaaaactatatgtag

SEQ ID NO: 428 - DNA, 331 bp, Glycine max
  Clone ID: 2DC-01-Q1-B1-F2
cggctcgaggtttctcagccgcctcggctagggttcggaaacgaagaacggttctgttttcttttcgcgatgagggccaagtggaagaagaagcgtatgaggaggctgaagaggaagcgccgaaagatgagacagagatccaagtagtgcgttaaacctagtttgtttccgttgcttttacaattgcttatgttgtcaaataggacacccagttgttagtggcactggtctctcctttttgatgtcttgatacagtttgttggattttatttcgtcctatgttcttagctgaaaacaatgctgttactgcgtttgcgaatcaacacgatat

SEQ ID NO: 429 - DNA, 384 bp, Glycine max
  unsure (1)..(384): unsure at all n locations
  Clone ID: 2DC-01-Q1-B1-F3
ggccaacactgaatttcatagcttgaatccaagttgggaagaaaacaatggtttcagcttcgcttcaattctggtcttggatagcacctactcctatatcccaccgttacacccataaatttgcttccctaacctcactcaaattagccactcctgtttcttctactaataccgtttatcttcccaaagcctctagttgtgcgttttgctctaactgagtccgactcgcccaaatccatagaacctgaccctcaaactcttctccaagaaattgctgacagttttgatcttccttccgattacttttcanagcttcncggcgatcttcgattagacctaaacgacgcggcgttcgacctttcaaacgggcctgttttaaaataa

SEQ ID NO: 430 - DNA, 358 bp, Glycine max
  Clone ID: 2DC-01-Q1-B1-F4
aagaggtcgaagaaaaacaagagcaaattgggatcgaagaatttgaagaacaccacaagcaagatgcatgttgttgtggtgctcaacacgcaatcctactgcagaggcctagaacctccttcatcttctccttccgtcgtttccaacaagggaacaaggactttgagtttcaggaggctgctgctgcgtccttctcttgggattcatttatcgcgtagctttgctttaaagtgtgttgttactccgaacccagctgtggaattgccattaactgctgaaaatgtagaaagtgtattggatgaaattcgaccctatctcattgcagacggtgggaatgttgctttacatcaaattgatg

SEQ ID NO: 431 - DNA, 389 bp, Glycine max
  unsure (1)..(389): unsure at all n locations
  Clone ID: 2DC-01-Q1-B1-F5
atcgaaaggatctcgaagacccaccaacgcacgaaagccgggatctttcagaaaatggattcctattcgaagggtgcataaccgcatggataagctcacactaacccgtcaatttgggatccaattcggttccttaggaggtatcgggaaggaattttggaatgtaataatatcgattcatacagatacagaagaaagggttctctattgattcaaacgctctacctacgagatagggatagagaaagaggaaaaaaccgaggatttcacatagtacttttggtcganaaatcgatctgatttttttcgtacttttcgctcaatgatgaaatgggtcagattctacaggaccaaaccttgtgggagttaaggaatgatggaagaaagga

SEQ ID NO: 432 - DNA, 374 bp, Glycine max
  Clone ID: 2DC-01-Q1-B1-F6
aaaatggaaggcaccattgattgataacccagatttcaaggatgaccccgacctctatgttttccccaacttgaagtacgtggggattgaattgtggcaggtgaaatctggtactttgtttgacaatgtcttaattactgatgatcctgagtatgctaagcagctggttgaagaaacatggggcaagcacaaggatgctgagaaggcagcatttgaggaggccgagaagaagagggaagaggaggaatcaaaggatgacccagttgactctgatgctgatgaggaagaggaagatgctgatgaagctggcaatgactccgatgctgaatcaaagacggaagctggagaagacaccaaggaagaggttgtacatg

SEQ ID NO: 433 - DNA, 363 bp, Glycine max
  Clone ID: 2DC-01-Q1-B1-F7
cgcactcgcagggacagagagtggggaaggaaaaacacagactaaatggcgccaaatgctctctttctcttctctttcctcgccatgctcctccttctgctccgctcaaccgccgccggccacaactaccgcgacgccctccgcaaaagcattctcttcttcgaaggccagcgctccggcaaactccccgccgaccagcgcctccgctggcgccacgactctgcattgcacgacggcgccaccgccggagtggacttgagtggatggtactacgacgccggggataacataaagttcgggtttccgatggcgttcacgacgacgatgctgtcgtggagcgtgatcgatttcgagaagagcatg

SEQ ID NO: 434 - DNA, 406 bp, Glycine max
  Clone ID: 2DC-01-Q1-B1-F8
gcagcataccatatccaatcattctaacggataggatagaaaagagcaaaactgtttgagtctgagagaacttgaaacaacaatggcttcactttccctctctctctccacaccaacaacaccaacctcactctccttcacatcatcctccatcttcttctcttcacaccaattccacacacacaataattctttcaaatccaacagctttcccgttttaccctccaaaaaacccctctccatttcctgcaaggcctcccctcctcttcccgtcctcaacttctccggcgagagggtcggcgagtccttcctcgacctccgctccgcccctcccgacaccgcccgagccgtcgtccaccgcgccgtcgtcaccgacctccagaacaagcgccgcggcaccgcctca

SEQ ID NO: 435 - DNA, 334 bp, Glycine max
  Clone ID: 2DC-01-Q1-B1-F9
caccactaaacctcaaaaggctcgctccacagcgccgccgcagcattcgaaggcggcgcggcggttctataaccaaaacatcaaggaatcctccgccgcgcgcctcagcaaggttctcgccgcctccggagttgcgtccaggagaagctgcgaagagcttatcttcgaagggaaggttacggtgaatggtaccgtgtgtaatacgcctcagactaaagttgatcctgcgaaggatgttatctatgtgaacgggaacaggcttccgaagaggcagcctcagaaagtttatctggcattgaacaaacccaaagggtatatatgttcatctggggag

SEQ ID NO: 436 - DNA, 365 bp, Glycine max
  Clone ID: 2DC-01-Q1-B1-G1
caaaaaaagcttctttgtctctcgtgccgattctccaccactattcccttcaccccaatcacactttccgctattagtgtagaagatgagtacgctggatgcaacaagggctgaacttggtcttcttgttttatatttgggcaaggctgaagcaagggacaaaatatgcagggcaatacaatatggttccaaatttttgagtaatggggaacctggtactgctcagaatgtagacaaaacaaccagcttggcacgaaaagtcttccgtctctttaagtttgtcaatgacctacatgctttgataagtccaacaccacaggggacacccctccccctagctctgtttggaaagtcaaagaatgcct

SEQ ID NO: 437 - DNA, 399 bp, Glycine max
  Clone ID: 2DC-01-Q1-B1-G10
tcgcatcgatcgaagtttcacatcacccttatccagtttagggtttcggttccttaccctacctttgacgtatcgaaaccttaaatttgggggtaagggtgaacaatctggttggtaaaaccgttggtcttacagagtcaagttttatgtctggattagacgatcaaattcctactgccttcgatccttttgctgatgcaaatgctgatgactcgggtgctgggtcaaaggagtatgtgcatattcgcgttcagcagcgaaatggtaagaaaagcctgacaaccgttcagggattgaaaaaagaattcagctataacaatatacttaaagactttaaaaaagagttctgttgcaatggaacagttgttcaggaccaagaactaggacaggttaatcaac

SEQ ID NO: 438 - DNA, 392 bp, Glycine max
  unsure (1)..(392): unsure at all n locations
  Clone ID: 2DC-01-Q1-B1-G11
ccacaattcacaaccgaaacagtttccatctctctcacaaaatgacaacaatatcaaattgctcccttctcttcctcttcctcttcctctccagcctccacatagcttccaccctctcaacccccaccaacttcatcaagtcctcctgcagcaccacccagtacccagccctctgcatccagtccctctccgtctacgcctccaccatccagcaagacccccacgagctcgtccagacagccctctccctctccctcaaccacaccgaggccaccaaaaccttcgtcgcaaaatgcaacaaattcagaggcctcaaaccgagagaatacgctgccttgaaggactgcgctgaaganatcagtgacagcgtcgaccggctcagccggtcgctg

SEQ ID NO: 439 - DNA, 389 bp, Glycine max
  Clone ID: 2DC-01-Q1-B1-G12
acggcctcctcgcttctatgtgcacttgctttctcatcttttctactgttgttgctttgatagtaaatgcatgaaaccaagaaaaagaaggaaaatagtaggaataagggcgcagatttgcagatctagagattccgagggaaatgagagttgagagtgagagtgaggtaatagaagtgctcgtgaatttcccaatctgccctgaacatgtgaagtaaagcaccacaccacacgcactatatcctcctcttaattattatgttctctttctgaatatctagtgccaaggtagattgatctgcaatttgttaacaatttttattttatgtactactagtaagttttatttcgttagtatagaaataaaataaattacaaagatttatgtc

SEQ ID NO: 440 - DNA, 403 bp, Glycine max
  Clone ID: 2DC-01-Q1-B1-G2
gctggcctgggctgtgatattggggcagcgcagcaatacgtaacaagttctatcattgaggaagtttccggtctccgaaaatgaacgacgcagatgtctcgaagcaaatccagcagatggtgcggttcatccgccaggaagctgaggaaaaggccaacgagatctctgtctccgccgaagaggaattcaatatcgagaagctgcagttggtcgaagccgacaagaagaagatcaggcaagaatacgaacgcaaagagcgccaagtcgaaattcgcaagaagattgggtactcgatgcagctgaatgcttctcggatcaaagttcttcaagctcaagatgacgtgattagttccatgaaagaagctgcatccaaggaactgttgaatgttagtcatcatcatca

SEQ ID NO: 441 - DNA, 403 bp, Glycine max
  unsure (1)..(403): unsure at all n locations
  Clone ID: 2DC-01-Q1-B1-G3
gcctcaggcccgccgaggccctctcgccgctcaaggaaggtcctgacggaaccgacggcggccaggactcctcgcgcggagagggaaggtggggccagtggatgaaaggaccactcgctagagcaccctctgtttcttcttcctcgtcctcttgcaacaacaaaaagtccgatctgaggttgcttcttggcgtgttgggtgctccactcgctcccgtgcacgtgtgcaccacggatcccttccctcacctcagcatcaaagacatccccattgagacttcttctgctcagtacatattgcagcagtacattgctgcctctggagggcagaagcttcagaattcgattaacaatgcgtatgccatggggaaggtgaggatgatagcctccgagttcgnagacgc

SEQ ID NO: 442 - DNA, 393 bp, Glycine max
  unsure (1)..(393): unsure at all n locations
  Clone ID: 2DC-01-Q1-B1-G4
atttgttccggaagaccatggggccagtgaagaaggctatggaagatgcaggattacagaagagtcagattgatgagattgttcttgttggtggaagcacaaggattccaaaggtacaacagcttttgaaggactactttgatggaaaggagccaaacaagggtgtcaaccctgatgaagcagttgcctatggtgctgcagtgcaaggaagcattttgagtggagagggtggtgaagaaaccaaagacatccttctcctggatgtggctcccctcactctcggaattgaaactgttggtggagtcatgacaaagttgattcccagaaacactgttatcccaaccaagaaatctcaggtgttcaccacctatcangaccagcagactacagtct

SEQ ID NO: 443 - DNA, 405 bp, Glycine max
  Clone ID: 2DC-01-Q1-B1-G5
aatcagataacctctgtcaacacctgtctgtggcgcgcgagagagaaatcggagatgtcatcaaaccctaacgatcctcgtcagccctcggcggcgagaccctacgtggcgccgcagatttcgccgcaggaccttccgatcgactacgccggcttcatcgccgtcatatttggcgtcgccggcgtcatgttcaggtacaaactgagctcttggctggcgctcatattctgcgcgcaatccgtcgcgaacatgcggaatgtcgagaacgatctcaaacaagttatgatggctatgatgttttctttaatgggattgataacaaactactttggacctcctagacccggcaaacaaagttgagatctcaagattttgaggcagaaaaaacctttttgtggggtcttt

SEQ ID NO: 444 - DNA, 401 bp, Glycine max
  Clone ID: 2DC-01-Q1-B1-G6
agtgatttcagtgagtgatcggtgttcacttgatctcatcataatcgtcagcgtcaattgaagaagatgccgatcagaaacatcgccgtcggaaggcctgaagaggcgactcaccccgacacgttgaaggcggctttggctgagttcatctcaaccttcatcttcgtgttcgccggctcaggctccggcatcgcctacaacaagctcaccgacaacggcgctgccacccctgccggcctcatctccgcctccatcgcccatgcattcgccctcttcgtcgccgtctccgtcggcgccaacatctccggcggccacgtcaaccccgccgtcaccttcggcgccttcgtcggcggcaacataaccttcctccgcggcatcgtctacgtcatcgccaagctcct

SEQ ID NO: 445 - DNA, 386 bp, Glycine max
  unsure (1)..(386): unsure at all n locations
  Clone ID: 2DC-01-Q1-B1-G7
gcagtgtctcactcaccccagtcacaccatggaggttgctacagcagcttctagcttcgcactcaacaagcccatgctggcattgccctcttcatctcgaactgtaaccccaatcagatgcatgaacacctccacctcccccgtcaggacctctctctctaccagcttcgtcgctccttacgccggaatctgcagcgcgtctagccctttctccggccacaagctccgtcnctcctcnctcaatccggcgtcgtttcttggctccaacgctaaacgaggcgtcgttaccatggttattccttttcaacgaggaagtgcatgggagcaacctccaccggacttagcttcttacttatacaaaaatcgaattgtttatttgggcatgt

SEQ ID NO: 446 - DNA, 282 bp, Glycine max
  Clone ID: 2DC-01-Q1-B1-G8
gagagagaaggtttggaagaatcgcgatggagggtgaggaaggaggaggcataaggctgagcacgcgaatcgcaaacggagaggttgactacaagacgaaatccggcaccgcctgaagccactcctatctcaaccagaagccatggcaccctctttcttaccccaaccaacgccgcaagtggatcgccgaacacacccacgccaatcgccaacgccgcaccgaacaggtttctctcgagttcgctcatgagcaagagttctttcactaaaccgctctcatct

SEQ ID NO: 447 - DNA, 332 bp, Glycine max
  Clone ID: 2DC-01-Q1-B1-G9
cgcagcgatcgaagtttcacatcagccttatccagtttagggtttcggttccttaccctacctttgacgtatcgaaaccttaaatttgggattaggtctgagcaatctggttggtagaacctttggtcttagagagtcaagttttatgtctggattagacgatcaaattcctactgccttcgatccttttgctgatgcaaatgctgatgactcgggtgctgggtcaaaggagtatgtgcatattcgcgttcagcagcgaaatggtaggaaaagcctgacaaccgttcagggattgaaaaaagaattcagctataacaagatacttaaagacg

SEQ ID NO: 448 - DNA, 385 bp, Glycine max
  Clone ID: 2DC-01-Q1-B1-H1
aataaactcacccactaagcactacacaaatcacacagagttgcaagagaaagataaaagaagatggcgactcttgattccgacgtgcctatggttcccgccggcgagccctcgagcagcgccggtccttcttccaagaagcccaagcgcttcgagatcaagaagtggaacgccgtcgctctctgggcttgggacatcgttgtcgataactgtgctatctgccggaaccacatcatggatctctgcatcgagtgccaagccaaccaggctagcgccactagcgatgaatgcactgtggcttggggagtttgtaaccatgcttttcacttccattgcatcagtcgatggctcaagactcgtcaagtttgtcctctagataacagtg

SEQ ID NO: 449 - DNA, 371 bp, Glycine max
  unsure (1)..(371): unsure at all n locations
  Clone ID: 2DC-01-Q1-B1-H10
gcccagtgtcatgtgctactgcctgatgctagctctttacgccaagaatgacaggttaaatgatgcctataatttgattgatgagatgatcacgatgagggtgtcggatattcatcaaggaattggacaaatgatcaagggagattttgatgatgagtctaattggcagattgtggagtatgtctttgacaaactcaattctgaagggtgtggattgggaatgaggttctacaatgcactgttagaagctctttggtggatgttccagagagaaagggctgctanagtgctcaatgaagcatcaaagcgagggctgttccctgaactttttcgtaaaagtaaacttgtgtggtctgtggatgtacacaaga

SEQ ID NO: 450 - DNA, 152 bp, Glycine max
  Clone ID: 2DC-01-Q1-B1-H11
agcagctttagtggtaataatcatggtcgaagggtggtcattacttgtccatgttgaattgctgagatgtattcttcgacacatatggatatgtgattgaagggtgtgtttggattcttgttatgtatcttacatatggtctctttgatttt

SEQ ID NO: 451 - DNA, 359 bp, Glycine max
  unsure (1)..(359): unsure at all n locations
  Clone ID: 2DC-01-Q1-B1-H12
gggcaatttgtggggcttgctgagatgattggtcctgttgattttaacaagagtgttgagtattggcagcaagacaagtggaatggttgctttcctcttaagtggcacattgttaaggatgttcctaacaatttgttgaggcacattaccttggacaacaatgagaacaaacctgtcactaacagtagggatacacaagaggttatgttggagcctgggctgaaattaattaanattttcaaggaatatnacancaagacatgcattttggatgattttggcttctatgaggctcgtcagaaaactattttggagaagaaagcaaagcaacaattcccaaagcaggtatgggaagggaa

SEQ ID NO: 452 - DNA, 268 bp, Glycine max
  unsure (1)..(268): unsure at all n locations
  Clone ID: 2DC-01-Q1-B1-H2
cagtgaagcagccgtcccagttataacccttataatgggagcaaacctccttaaaggcaataattaattcttatatagccatgctttttttttaaaaaaaattttatactcctctttggcagcttatgaataatttttctttcttggattaatggaccacaggtttgaagggagcaaatacttcgttttggacaattcttggaattatagtagttcgatatattttcctgccaattttgggtattctagttattanagggagcaacac

SEQ ID NO: 453 - DNA, 360 bp, Glycine max
  Clone ID: 2DC-01-Q1-B1-H3
tcttcttcgtcacaaacctcttcggtcattcgattcactccacttcttcaaaaatggccagatacacagttcgcgttctcgtcactggagcggcaaggcaaattggatatgctcttgtccctatgattgcgacgggagtgatgctgggtcctgaccaacccgtgatcctccacatgcttgagattcctccagcatcagaatcgttgaatggggttaaaatggagattggtggatgatgcattcactcttcttaaatgtgttgtcgcaataaccgatgtggatgaggcatgcactggagtcagtattgcaatgatgggtggtggattccctagatcagaaagtatggataggaaagatgtg

SEQ ID NO: 454 - DNA, 369 bp, Glycine max
  unsure (1)..(369): unsure at all n locations
  Clone ID: 2DC-01-Q1-B1-H4
tctgagtattctgatcgctccctgagagagctcgtcgcggcggttgcagaagaagattgcaagatgaagttcaacatcgcgaatcccaccactggatgccagaagaagctcgagatcgacgacgatctgaaactgcgagcattttgggacaagaggatctcacaggaggtcatcggagatgcactcggtgaggaatttaagggctatgtcttcanaattaccggaggttgtgacanacaaggatttccaatgaagcagggagtgctgactcctggtcgtgttagacttttgcttcacaggggaactccttgcttccgtggatatggaaggcgtaatggagagcgtaagagaaagtctgtncgtgggtgc

SEQ ID NO: 455 - DNA, 247 bp, Glycine max
  Clone ID: 2DC-01-Q1-B1-H5
gcttgtgctgccttcgtttgcgtttttatcacagaggaattaacatatatatagcatgcatggcagtcacactctatgaccttagctcttcggctgggttgatgaaacttgatgagtacattctcacacgcagttacatcaccgggtaccaagctctaaaggttgatcttactgtatatgcatctatgccaactgttccatcaggaggttatggtaatgtttccaggtggtatcagcacattgactg

SEQ ID NO: 456 - DNA, 345 bp, Glycine max
  Clone ID: 2DC-01-Q1-B1-H6
ggacgtggctttcgtggtcgtggaaggggagggtacaatgggccccatgttgacatgcaagatggaggatacaaccaagatgtacctcaaggccgtggtacttgatccttattacttttgttcatttctgtggtagatacatgtgtgcaaggctatcagtgttaggcaatcagcttttgcagttgatattctgggaagtgtttgaactgtttgttttaagtaatggatgttacctcttgatattttggaagtaattaagctggttgtgggtccttactgtctagactctggagcaatttcatatattaccttaactttgtcatctatattaatcatagtacattt

SEQ ID NO: 457 - DNA, 296 bp, Glycine max
  Clone ID: 2DC-01-Q1-B1-H7
agctgaagaaggtgtttgcagggaaagatcaagttgagatgctagagattgctcgcttgattagccctcacttccttaaaagtgaaagtgaaagttaagtttttgtatgaaggtcatgctttggtgtattgaacaattacatttggccttgagacatagtagcgtttagtttttgtggtactctgaatacagaacgagcattgttgaagagttcgttttgattgatgtagtctcttcaacaagttagtatttacctattaggtttctatttgacatcttaaatattatggttcaaa

SEQ ID NO: 458 - DNA, 274 bp, Glycine max
  Clone ID: 2DC-01-Q1-B1-H9
aagagaacatgctggtggtgaaggcagagaaggcactcgaagagaatcatgaaggtcgagcaaatggcaatgaagactggcctgccaatagctatggtagatataaccacaggatagccctcccagaaaatattgagtttgataaaattaaggcacaggtcaaagatgggattctttatgtaacaattcctaaatccagcacctctgcaaaaataattggcatagatgtacagtaactataagctcataataaagtttgttcacggctacattt

SEQ ID NO: 459 - DNA, 356 bp, Glycine max
  Clone ID: 2DC-01-Q1-E1-A1
aacaatataatttgccaaaatttcaatagaaaacatatgtacctcttttcaagctatgtatagaggtttgtatttgcattagaattattgtttccattacattctctatttcatgctacatggtttattatttttctaagggtttgtgtttggagatttggatgatctcgtagtcaaagaaggcttcatctgaactatatgttcttcattcactcccattttccttgcataacgacctgcttcaaagaaacttctaactgcatcatccatgtaatatttcccttgcttaacagtcatgtccctccctattgtacctgggaaactagtgaggatattatcccctttaatcaacgctg

SEQ ID NO: 460 - DNA, 289 bp, Glycine max
  unsure (1)..(289): unsure at all n locations
  Clone ID: 2DC-01-Q1-E1-A10
agcaaacaaaaggacttttagcattgttcttagaaatcaagtttaggcagtgaaacacatgatatctgccaatatattttggctattgataacaagttgaacctcactcaaattcaagacagttagcaacctgaaaagcaaatatctctacagcttgacctccacatcaacaccagcaggaagatcaagttgcatcagagaatctattgtttgagctgtangatatagaatatcaatgagacgctggtgagttctgatctcganatggaaccgggcatccttatgtacg

SEQ ID NO: 461 - DNA, 388 bp, Glycine max
  Clone ID: 2DC-01-Q1-E1-A11
cagcagtggtaccctcaatatcaatataatgatgagggaattgttacctttccactttcataacatcaagttggagagaatacattgttttttcaactggaacctggaatgcatttgcactgtgctcaaacacaagataggaaccaatctcatagtggaatacatcatggttcattctacaatgcaactcctactccctccacagcagctgccattgatgctgaggcctcttcaagggtcctcctcttctgaactgtgttgaagacttcaagaatgtcaccctcttcccaatcatcaaagtcttctaacccaagtccacactcgagaccggcatttacctctttaacaatccccttcacccgtctcaaagaatcaagaataccaacat

SEQ ID NO: 462 - DNA, 282 bp, Glycine max
  Clone ID: 2DC-01-Q1-E1-A12
ggagagaaaaattgcaatgtgtttgtaagcgggagattacaacaatacaatattacaatacattacatttctaggtaaagcaaaactaatgatgaccaaatgattacatatttaaagaggaagaagctacagtataggcacagtgcacaagatgttcatgattcgggttcgtctgatttgatatcgtccatagtaacttttgggtagttttcatagcccataatgctatttatccgtatacgtgtatttggctgtctgtgtccaatgtttctgcgataatgt

SEQ ID NO: 463 - DNA, 388 bp, Glycine max
  Clone ID: 2DC-01-Q1-E1-A2
tcaagaacaaaacgcatggaaatatattcaatcaaaaatcaaacaaacaagatgtaagcaacacagcacgcacgcacaagagggtggagagagttccaattatagctaaaagtattagctaatttaagcaatcatacaaacccaagttacacaaaagagaatacttctagcaagcattctgctattacaacattcgctagaaaagataagcatctttctccaagaaccgccagactcgcatgaaatcaccagacaagaccaaaatttttcaaatgtctcatgctttgctggcaatgttgttagaaagccagtccaaaccctcatagagaccctctccagaagttgcacaagtgctctggatataccagtggcgttgacggagtgaatg

SEQ ID NO: 464 - DNA, 296 bp, Glycine max
  Clone ID: 2DC-01-Q1-E1-A3
aattaatctaaattctaatcacacgctagctcagcgaaaggattattagaatattctattcttcgtttttttctgagcatcgaggggggtattacttccaataccgtgtttctaaacagaaggaatatgtacactaaagacaaaaagacttaaaaaacggaattacagggaatagaaagaaagaaggaaaggtaaccaaaaaaacaaaagaagcagcgttaaaaacttgtaaatgttggggggggaaacgggatcaaacccaaccctgtttgtaacggtcgaagaggttttctgtt

SEQ ID NO: 465 - DNA, 376 bp, Glycine max
  Clone ID: 2DC-01-Q1-E1-A4
ttgaaatacggaagtagctgcttaacactgaaacagagtaaaactttctaacagttaataaaggtatagccgtctgcagaaattgggggtaaatgattttcaattaaatccaaactaggataacaaaatgacaagaaaagagtgatttggttggatcatagcatatttgtttttccatttgaaatggtgatgaacgtcaatccaacaaatttcccctttcacgttcaggctcctccgaaagtaggagtacgtcaaaacaaacacgcttaaaagttagtccattcttcctttcagtatcctttcctttacttcggttggggtgacaacataaacatgtccaccccagccacttaaacaatcacgatctacagatgat

SEQ ID NO: 466 - DNA, 382 bp, Glycine max
  Clone ID: 2DC-01-Q1-E1-A5
ttgcattcggccttagcggaaggcatatataagctttgattattttatttagtgtaatgatttcgtacaaccaaaggatttagggggtactctcacacttgtgtctcactcactgcgagaaaggccatgatttttcttggccagtgattctttatcaagtttttgaaactgaaccactaacggtttgttcttagacaccaccaaacgcctggttccatcatcatgatcaatactaatcccaatatccccacatttgtcatcctcagcttgctgtggacagaacacaagcttatagttattgaattcatcatcagaaactctctcaagtctaaaccaaccatccattgcatctttgttctcaccaattttaacagcaggtcct

SEQ ID NO: 467 - DNA, 379 bp, Glycine max
  Clone ID: 2DC-01-Q1-E1-A6
tttttttttttttttttttttttttttttttttttttttttttttttttttttttttttttttttttttttttaaggcaaaagagaaaaaaaaaacaaaaacatccccctaataatgcaaacaattaaacaaggggcaaatttgcattaaaaaacctaaaccaaaatttaacacaggatttaccacccccaagtcattgaaaaattcggggaaaaaaatgaaaacaaaaattaccaaccggcccctttaaaatgtaaatgggcttgtcaaaattggccaatccggtttctttaaaagccccccccattgttggatttgcaaggaaaaaacgtgcaatgtccccactaaatccaacaaactgtacagcaaatgccgcttc

SEQ ID NO: 468 - DNA, 389 bp, Glycine max
  Clone ID: 2DC-01-Q1-E1-A7
ttgtagaacttgaacaatgtgttaagactaaggtggtaaggcaaaattccaaggggatagtatgattacagtaagacgaatgttgtcctttaactacttatgaaatcaaaactcatgctaaagaagtcttttacggtctatcttaaagctaaaacaaacaaaggggaatcggcagcaccgtcattaaatagtggatgtcatgcaaaatctacaactcgtccttgacatcattatcatcgttaacagcatcagtttcaggctttgaatcttctttcgcgtcactttcagcctctacttcagtgtcatcttcctcctcaactgttgcttcaagactgatgtccaggctagtcttcactgaatcataaatccgggaagcaaaatccttggga

SEQ ID NO: 469 - DNA, 387 bp, Glycine max
  Clone ID: 2DC-01-Q1-E1-A8
aaccaataaatttgagacatctacttctatagtgaaaatacggactacaaatcagtttcaaatgacaaccagcgaaattgggaacatacatttaaactttcaacagacactcatctaggaagaagcctgtcagatattgaaactgtgtacatgtagtctcaatgcatgtaagtgtatttctttcccaaactgtttttgccaatgacatcttgcagctgtataactcccaagtcccaaataccgaaatcctctctcgggtatagacgaaaagctaaatcctcagaactgcttgggcttggaatctgctaatgagactcgtatagctctgccattcaagtccacgccatttaaggactgaattgcactgttgacctcatcagggctact

SEQ ID NO: 470 - DNA, 352 bp, Glycine max
  unsure (1)..(352): unsure at all n locations
  Clone ID: 2DC-01-Q1-E1-A9
gcaatcacagcaatcgaattaaaatattaaaaggggagcagttaataataagcagatggaaaataaaaggagaaaaaagttcgattaacacaagaaaaacaaaatcctgcaatagaaaaagggtagcgaaacccgtagagaaaattagtttgtatgataagggggcaaaagagactaatcaacggtttgcatgatatcttcgggagcgaacttggtacccttctccttatcggaagcggcgcgacccttggccttgcgatcgagaatggccttacggtccttgtccaatttgagcttggtcagcacaaccttggaggggtgaatcccaaccttgacngtggaacattcacct

SEQ ID NO: 471 - DNA, 381 bp, Glycine max
  unsure (1)..(381): unsure at all n locations
  Clone ID: 2DC-01-Q1-E1-B1
tacaataaaactctaaatttttattaaaagcattgtcaggaaatcgctaagttgtcaacacgatcgtagattcgtaggggatactgaggaaaatgatgatggacatcctgagtactagaagttacaaaaacaatgaaactaagaaaaagaaaatgatggatttccctgggatactgatactgctaagactaataagagtgtcccaaaatacattactcttgttcaaaagatggaaaagcagaaccagtcttaaggattgggtgcggtctcttgagcctccttggaaagcttgatctccttgagctcccgaatcaattccttcatgttgttgtgcgaagatccacaanctttatagcactcttcgccgcaacgcttaactcc

SEQ ID NO: 472 - DNA, 195 bp, Glycine max
  Clone ID: 2DC-01-Q1-E1-B10
ccaatgtgagaaggggaggttgatgtagtcgttgttggtttggaagggtgtgttgttgtcgtggtaattgttgtcgattgtggatgtgttgtcgtcattttggctttggaaggaagagttgtttttggtggtgtcatcgttgtcgtagtttgacttccttaaatgatattgtcgtggtggttgtgatgttgtcac

SEQ ID NO: 473 - DNA, 391 bp, Glycine max
  Clone ID: 2DC-01-Q1-E1-B11
accaaacatttatatatatatatatatatagaaaaaaggcaaccatgaccttaacacacccatcacaagtccaaggcacgtgaacttgctcaagggcaagaaatgaccactttattctaagggtgtttgtttagacacaaaacaccagagtgcaacataatacatactacataattttgaagttttgaaactacatatagtttttatcattatttctaagggccatttctgcttgaagctttagctctccaacacctcacttgcaagtgcaggggttgcaggtgcagttagctccacatttgcagccatcgttctcagcgggaacacccatttcagcactctcgaattgagccttaactggtgccactcccatgaccaaagtctcggtggt

SEQ ID NO: 474 - DNA, 261 bp, Glycine max
  Clone ID: 2DC-01-Q1-E1-B12
aaaaaaacaacaatcttttattgggtaacatacacaagatgtccaaagaccaataagaaacaacgacacttacaagtaaaacaaaaagaaatcatgcccgggggaacatgcactgatgcacattcaacaaccataaaattattacagccaaggtaaagcgtgacgcacaattagacctaattaatacaaaaggagaagttagtaagcgaacccaaaaaacaaagtggtaattaaccccacccccaaacccccaacgttgcc

SEQ ID NO: 475 - DNA, 386 bp, Glycine max
  Clone ID: 2DC-01-Q1-E1-B2
ttcagattaactagccgaactttatacagaagcgaccaattaccaaacatttatatatatatatatatataaaaaaaaggcaaccgtgaccttaacacacccatcacaagtccaaaacacttgaacttgctcaagggcaagaaatgaccactttattctaagggtgtttgtttagacacaaaacaccagagtgcaacataatacatactacataattttgaagttttgaaactacatatagtttttatcattatttctaagggccatttctgcttgaagctttagctctccaacacctcacttgcaagtgcaggggttgcaagtgcagttagctccacatttgcaaccatcgttctcagcgggaacacccatttcagcactctcca

SEQ ID NO: 476 - DNA, 356 bp, Glycine max
  Clone ID: 2DC-01-Q1-E1-B3
tgggccaacattcaaaaaaatcataaatttcaaccatgagatgaataaatacaatacactggggaaatttattgtcaggggtttgagcaaccgttaaatacacttcaacactagccattccagtcaacattctatgtatgtgaaggatttggttgccgggtgatatgaatttattgaaacacagaagacaggcttgcagcatcactaagctaagctatgtagttattgcattaatatgaagtctgaagggtaatttttaggtacgatataagagagaaagatgagtttaaattacatgatctcattaactcaataaatttcattttacaatgtactcaaggaataacatatcaaag

SEQ ID NO: 477 - DNA, 347 bp, Glycine max
  Clone ID: 2DC-01-Q1-E1-B4
attccagcaatagtactagtttaatattataagcagagattcataattcagattaactagccgaacgttatggggaagcgaccaattaccaaacatttatatatatatatatatataaaaaaaaggcaaccatgaccttaacacacccatcacaagtccaaaacacttgaacttgctcaagggcaagaaatgaccactttattctaagggtgtttgtttagacacaaaacaccagagtgcaacataatacatactacataattttgaagttttgaaactacatagagtttttatcattaatttcaagggccatttctgcttgaagctttagctctccaacacctcac

SEQ ID NO: 478 - DNA, 381 bp, Glycine max
  Clone ID: 2DC-01-Q1-E1-B5
caccaaattggggacagcatccttgatcgaaaattaaggaaattatcaaaatacacaatacacaatacacattaattggaaaataaaatgagaaaatgaacaatgaagcttaaataaacctgcaaaaaaaaaaagcacattgaaattgacaatcatacattcttcaacttcttcatcttagaaggtggccatctacccttctttctcaacttgcgtttccgaagaagccttttccgcctcaaccttatcttcttcgccagcttcatcctcagcttttgctcctctctctccttcaccttcgactccaacggaagcttctccacggaggcgccgctctctttctcgctctccgccggaggaggcggagacaatcaccgactc

SEQ ID NO: 479 - DNA, 376 bp, Glycine max
  Clone ID: 2DC-01-Q1-E1-B7
ggacttgtacttgttttattgtagtaatttgtgatgagaactgagaagggtacacactactctagcctcgggggtgcggcagtaccggagggtaaataaccgcgacaatagtcaaagccataccaaatatcattaggtatgtaagtgttgtagtaaaatgtaacaggttggtagtaatagctgtatacggtcactttctctggcatccaaccgtcgtatccactccggtatagatacagataacatgtctggtacgtacatggaccgtatatctcaaatgtatccgtagagcaccgctcgaatgtacctgaaccaggatcatccagtcttggaacataaacctgatagccataagcatcaccaaatgcaagaccga

SEQ ID NO: 480 - DNA, 366 bp, Glycine max
  Clone ID: 2DC-01-Q1-E1-B8
accataattcaaacataagttgcacacaatgtgcaaaaaaataatggaccaagcaatctgaagtctgaacagggttcagagtcaacatcaacatctagatataaaagtagtggcatgaaattaaaggcactctgttttatattcagcatagactatattgcggcttagaaagagatgagatcatctttcgatgacggctgcttctttgtctcgtgtcccccatctgatgctttcccacctttcttcccaaaaatcatctcatcgagatcatccatcatgtcatcattgctccctccctcgacaccagtccttgattcagctggctttcgaatcaaagcatcttctttactatgatagggtgactcg

SEQ ID NO: 481 - DNA, 383 bp, Glycine max
  Clone ID: 2DC-01-Q1-E1-B9
gaaaaaaaggacggacaaatatctactataacaatcaataacaagtacattagcaagtattcaagccaagtacatcagcgagtaggtagggatccaaaaactcgatccccctccacaagagaaaacatcaaaagtccaaaaaaagagctaatgctcctccaacaagtaacaccactggtttcagaaaccgatttattcagacctctcattttttgctcgagcaagacactaaatcgcagctaaacataaacatacggtaataatgtgaagacaagctactttgaagtaacaccttaaagagacttcttggcaacgaatacaagaagatcaatgacacgtgagctgtatccccactcgttgtcgtaccaagaaacaagcttcac

SEQ ID NO: 482 - DNA, 314 bp, Glycine max
  Clone ID: 2DC-01-Q1-E1-C1
aaaaacagcaaaaagtcgacaaatataaaacgttactaatacactaataaatagtgcaagaaagacagccgatgttatatatatggaaaaaaaaaaaaaaacacagcctatttctcactaaaattaactatcaataggtccttcagacttcagaggtaataaaacactcacattcggaaaccttctcctgacaaaattacgatgtcaaattacaggagactaaatatccaattccaatctaaaggcaaaaaaaggcatggatggtaagggacttcatttacgactcctggcttcctccttttccttctctcgct

SEQ ID NO: 483 - DNA, 318 bp, Glycine max
  unsure (1)..(318): unsure at all n locations
  Clone ID: 2DC-01-Q1-E1-C10
tttagcgaaaaagaagtgtaaaattaaggtacagagtttaagcaatatttgtggcataataaaattgacaataggtacatgatatcagatgagaatatatagcatataaaggaagcacgggggatgatgatgatgaagatagagttgtgtgctcacaaatcatagggctgcttgccagtgaacttgacctcaataggactaacattcttaccaatagacctgaagttttgacccaccccttggcgtccggcgttgaccttctcaaggtanacaccatccttaaggttcaaatactgaaacctcccattaaggaaaaac

SEQ ID NO: 484 - DNA, 382 bp, Glycine max
  Clone ID: 2DC-01-Q1-E1-C11
tttttacaaactggccataccgctttaccttcaaaatataaccagggcaaatcagttacaatagactagagttgcaacataatgggagtccaataagcttttaaaattcataagcgtcttccaaacaagaacaaaaaaatcagattcctatactttctaagccccctctgctagagtcctctttgaggtactaatgtatagaacattattccctcggatgaaagcgtcaccatacttgttcttcaattgtccattgacgtattcctctgtctgctccattgcaatattcatatagccatctagacaagcaagtatacctctgtaatcaacaccagaattgagcttgacaacaaccggcctcccacgaatggatttgagaaaa

SEQ ID NO: 485 - DNA, 308 bp, Glycine max
  unsure (1)..(308): unsure at all n locations
  Clone ID: 2DC-01-Q1-E1-C12
tttcctcttgccttcaggataagccaaataagaaaacaaataattccaattcatatatgaacatttttgcctccttatttcttgaaaatgtggaattggaattccccgaggaattccgatctcatttcctttggcttcaggagangcctaataagaaaacaaataattccaattcatatatgaacatttttgcctccttatttcttgaaaatgtggaattggaattccccgaggaattccgatctcatttcctttggcttcaggataggcctaataagaaaacaaataattccaattcatatatgaac

SEQ ID NO: 486 - DNA, 367 bp, Glycine max
  Clone ID: 2DC-01-Q1-E1-C2
acaaaacagtcggacacaattaagtggaaatattatgtaaactacataataagttggtaccgcacgtgacccgaataataatctcccatctaaagcatgagacggagtagagatagataaaaaaaaaaagaagcaataattcacaagagttgctcctcaacggccaattcctcaatcatgttgccatggttgaaagggttgaaggcttgaatctcggaacacttgttaggtaggatcatagagccaacaaggccttgctcaagagagtgatataatttacgtgctatgacaaccgaattgatgacctcatcggaagggtggaacacagagagaacctcaaaacctcgaaaatcacaaggctcaacca

SEQ ID NO: 487 - DNA, 337 bp, Glycine max
  Clone ID: 2DC-01-Q1-E1-C3
cccacaatagactcctcctttataataaaatcacaggacaacaaagaaaaccagggaaattgaataatagtttctgtcaccacatccataaaaaccattgttaagactagtctgactagaatctatacgccaggtcttgaacaaaccaatataaaaggcttacaaaaatatctttgcttaaatagaaaatagaaataacaagcaacaagcaccaaaagctaattccttggcccaataacccttaaggcaaaaatctgttcctcacccatagcagacattacaaacacaacaagattcttgccctcaacaaatccaacctttatccgaatgaacaaac

SEQ ID NO: 488 - DNA, 383 bp, Glycine max
  Clone ID: 2DC-01-Q1-E1-C4
tttttcaacaaagagccgagtacatcagcaagtatataataatccaaaaactccatcccctacacagaagagacaacaggaaaagggttaatgctcctaacagggtaacaacaccggttcccgaaaccgatttattcatacttctcatttctgcccgagcaagaagacactaaatcgcagctagacaccagcacataatgtctagacaagctacttttttttcagtacaaccttaaaaagacttcttggcaacgaatacaagcaagtcaatgacacgtgagctgtatccccactcgttgtcataccaagagacaagcttcacaaagttcttattcaatgcaattccagcctttgcatcaaaaatacttgatttgctatcgccc

SEQ ID NO: 489 - DNA, 265 bp, Glycine max
  Clone ID: 2DC-01-Q1-E1-C5
tgcacaataagatatataattcatattcttcttaaaagaaaacattcaatatgtatttctccaaataacaatgaaacgctcaggcgaattttcaagtcactgtgtttctctttgtttcactattgctatgctcactttccggggacaaagtttgtagcataggcccaggcattattgtttaccgggtcagctaggtgatcagcaaggttttccaaaggtccctttcctgtcacaatggcctgaacaaagaaaccaaacatggaga

SEQ ID NO: 490 - DNA, 385 bp, Glycine max
  Clone ID: 2DC-01-Q1-E1-C6
tttttaaacagatagataaagaatatattgaattcaacctgaacaaagtagctttttgaagaaactgttcactttcagaaaactggcaacaaaaattgaacaatgtttttcacttccttaacagaactatgaccagctgtatatcacaaacatcgacatctaaaaattacattcccttcacaaatttcattacttccacaattcttccattggaatcccacgctcctcagcaacctcacgaaactgcttcattttctgcacagcagcaacagtcgctctggcattgttgagtgcaatattactccctagttgctttcccaaagcattatcaactcctgccatttccagaacaattctcacagacccacctgcaataaccccaata

SEQ ID NO: 491 - DNA, 389 bp, Glycine max
  Clone ID: 2DC-01-Q1-E1-C7
acgatccaaccttaaaatttgacaaatggttttggcaacaatacaaatcacaactccattacaaaattactcaaaaagccaacggggtgatatcatttaccaaagtcttaactatcataccattcctatgactcaaattcctttataaaaagaaaaaaaaaccaaaattgcccaaaaaaaacaacataaacgaaacaacaaaaaaccactgaaatttcagcaacttcattcaagaggaacctcaacatctccatcagaaatctcctgctgcagattcttggggtccttcccatcaacggtgcaaccaaccgaaacgcaagtcccgagaatctccttaatggttccactgagattcttgggcatggagcgaggactcatgaccctggcga

SEQ ID NO: 492 - DNA, 392 bp, Glycine max
  Clone ID: 2DC-01-Q1-E1-C8
tttcgaccaaaaattcaatagatgttattccaaatactacaaaacaaattctcatactgtagaattcatcaagcaatgttttgagtcagatggcgcatgatgactgattgtgcattgctacttcaacaaaactcaatacaatgctaaaggttttacggataaacaagagtaaaaaatggggaccagggtattttacacatttagacgattgaatcagaatcaacacactggattagtgattgctgcatcatctgcagaagccagcaccagttgagatttaagtattgctccttcttgtctagcttttttgcgttcacgcctcactcggaagtactctctcttccttgctctatagctgttggggttctcaggctgtacttcttgagggtaaa

SEQ ID NO: 493 - DNA, 343 bp, Glycine max
  Clone ID: 2DC-01-Q1-E1-C9
aataatcatgttccagttatatagaaatattattacgtgcagcaaaattattatatttactatgatttaaagtagtggtgagtattaacaaatatcgagcagatgaaattacgaatcaaaatttacaacttgtattgtactattggtatatccccctaccagttttgacttaagaggaagaaggaaaggcatctttaacagcagaagcagcagtgaggtaattaagcgtgttcttcaacgtgtccttttccctcttcaacctggtggcagtgtcctccaactccagaagcgcttgttgctccctcggagcaccctcgaacgtgcttccgacaaagaacgaaaa

SEQ ID NO: 494 - DNA, 348 bp, Glycine max
  Clone ID: 2DC-01-Q1-E1-D1
aaaaataagggttaaataaaaaattacccatcatatcataatataagttcttccttggtgagtcttcgttatattgaattatattatatatcatatgggataaaatgtactacgggaacgcaaataagggggtgaaccatgctcaaagacataccagacccagattccatatcaaccttttctccttttccatctttaccaattttccaatcaaaacactgcaccataacagcaactgcaattttcaacaagcctaattccaatgctgtctcctgaaaaactctcctcccaactccaaatggaacaaaatttaacttcattctcttaccatcatcactcaaatcctca

SEQ ID NO: 495 - DNA, 234 bp, Glycine max
  Clone ID: 2DC-01-Q1-E1-D10
cggcatcaaacaatatttatttattaaaaaatgacaggatggaacaaactcagtacaaatcccgtaactaatttgcataaattatagtagtactttaatttctccgtttctaaatatctatatcaaagggagagagggctatgtcaaatccccctgctataaaagcattggacgaacctgctaaatagttggaccccccccccacttgccaaagattcggaagttcatataatt

SEQ ID NO: 496 - DNA, 276 bp, Glycine max
  unsure (1)..(276): unsure at all n locations
  Clone ID: 2DC-01-Q1-E1-D11
ttattaaattcccaagtcgtattcaaatccttatcaataaaaccatgaagccaaattaanatatttctagtacacacccaaaaagtcggtcaaaaaaaacttccgggaatctaacacaaccaaaatcataatttaatgaaattctaacccatcgataattaaatttgatggaaattatgaattaccattaccacatgtcacaccattaaagtcaaaataccaggtcaaagtttcaattaacttaggacagaacgtaaaaaaaactagataaaatga

SEQ ID NO: 497 - DNA, 283 bp, Glycine max
  Clone ID: 2DC-01-Q1-E1-D12
ttttaagaaagatcacggggaatccatgcctctcgtgacacgagattttattcatgaaacatcttaagcattacgtagaactgcattgtctcaattgtgagtcttatcctgagtttgtgcagcaacagcttcaccggcgtagtagcagcaccttctacaacctccattgtatgtccggccaccgcaacagccatagcgacaataccctcctccacggcctggatagccgccaccacgaccagggtaaccaccaccgcgacctggataggccacaccacgacca

SEQ ID NO: 498 - DNA, 383 bp, Glycine max
  Clone ID: 2DC-01-Q1-E1-D2
atagaaaaagatgattaaatcattcaaaactcgaatttcaaagtcaaaacatcaaatgctgtgtgttctcaaaatagtaggtcaggaaatgaagcaaaaataagatgacagcgaaattaacggtagcggcggagagacagggtgttgtttctcttccaggttgccctgcgggatggacgtgctttgtgatatagatgtcctctgccacgtaaacccctgttgcttttcccggcagaggtaagcccacgcagctctctgtgcttgtgcactggattggcgagccaattgattctgggatcatttctaatagcaacatgagcaacatccaccagaatcacctcaaagtaattataagtagagtcctcattcacccaagtaagaat

SEQ ID NO: 499 - DNA, 220 bp, Glycine max
  Clone ID: 2DC-01-Q1-E1-D3
tttttttttttttttaacttgaacactctctttttgatattgatattaagagacacattggtagggcatacatacaaggagaggagggatgtttttagttgatcacgtaaaaaattacaaaagaacatacaaataacaaaataggaggaagaggagagaaacacacagagtaagagacgtggaaattttggatattaaacatattataagggcaacgctc

SEQ ID NO: 500 - DNA, 359 bp, Glycine max
  Clone ID: 2DC-01-Q1-E1-D4
atcgaaaataattcatagatagcccacaataattacaatctaccacatgtccacggatgctcttgaaaccatctttaaggtgcagggccattctgatacaggatagatgcattacaaagctaacaacaccaaccaactttcaccaaaccagcacttaaaaacttaaacactgtggccaacatatatattttcgccaatcacatgaaagagtccttcaaattgcagagatgtccaataactccaagtcacccaccacatataacaatataataagaacaccaaattaaatgttaaggaaactcggatcatttcaagatgaaattaatcataacttcatctcaagccatgaaactttgact

SEQ ID NO: 501 - DNA, 383 bp, Glycine max
  unsure (1)..(383): unsure at all n locations
  Clone ID: 2DC-01-Q1-E1-D5
acatgtatcacggccattatccgtgcaattaatagaattatagcaaaatgaagaatacaccaaggttggggcaatggcaagatataacacattgataagcagagcattgccctgaaattaagcatcttacaaacatcactgtgcacaaatttttatttcttcaaactacatccccagttcataatttattgtgcataaaatcaaattcaaggacacctcctacagatagaattattcaaagagatacacttgatcatatcctttcccagccgttccaccaaaagtaggtttgtaattgtagatgagattatctcgcactttttgagcatcaggtgtgtttgtggatttcctagcttcacttatganaaagtttgctgtggact

SEQ ID NO: 502 - DNA, 364 bp, Glycine max
  Clone ID: 2DC-01-Q1-E1-D6
ggatgtcaaaaaccctcgttgaaaaaacaaaaattccttgcaatcctcaggtcgagatacaaagccactacatattaaatgaaattaaaacgacagaaagaaacgtgttccaaagagctcggcatcaacatagaaacattaaatcctatataattcactgacccagcaaaaattgctattattcaaagcttaggtagaggcagcagctcctctcttcctgggtgcagcttcggtaccgtctctgaagccactcttaaatctacggggcacgttacgcaagtacctcatccttccagttccggtggtctttctcctaatggccttcacgctccagttatatttcctggtgcgcgcagcggggaaa

SEQ ID NO: 503 - DNA, 393 bp, Glycine max
  Clone ID: 2DC-01-Q1-E1-D7
tcaaaaaatatgcctttctttccacaagtctcataactcttttgagatgtaatatatttcgaaacgaaaatacagcgggtcacggggacttcaaaaatcttccataagatcacatacttaaaaacgatgaatgtctgaattaaatgaacaaagaaataaataaacatatactaaccagtatcatcctttattcatgatacactcaactgagacctaaacaatagcagagtagtctcagtctcacccatcagcagcagcagcagcagcacattcagaaaatgatatcctcatctttgtcacccacagacaacaagttgtgagcagaattgtaggaaagacctttgcgcaaagggagattagtgtcaagcttggagttgttctgctgcagcatct

SEQ ID NO: 504 - DNA, 393 bp, Glycine max
  Clone ID: 2DC-01-Q1-E1-D8
tgcaaaagaagaacacttgttaaaatttctagcaaaggaatttacatcaatactcttctaaaaatatatccacctatagtacggggcaacccgaaatacataaacactataacgccaaactaaaacccactccaatccctcacttcttagccttggcctttttcgctggagatttcacgcttttaggtttcttcacgacgctcttgggcttcttcacggcctttacgggagtcttcttcgcaggcttagcggcgaccttcttcggcgcggccttagcgggcttggccttgggcttggtggccgcagctttggccttgggtttggcaacagccttcttcttaagtgcagcagctttgggcttggaagcgggcttggcggcgggcttagccgcag

SEQ ID NO: 505 - DNA, 390 bp, Glycine max
  Clone ID: 2DC-01-Q1-E1-E1
taatttttaattgccgataaaaaaaaagggcaaccgttcgtaaaaccaaaacacttcctgctagaaataaagcgtatgtcatcagagtatggtaaaacatcaattcaggctaacacgaaactgacaaaaaaaacggctactccaacttcaaaaatagtatccaaaatttcggacctagaaaataaacagtacatgtaaataaattttcaagaaaatgattccctatacgcaaaataagatagtttctagttgtgcaacgatgatacggaatcttgaatgaactttcactcatcatcttcatcgttatcagcagcagagttgagagacgccacacgtgcaatcaacttaaccttcctctcctcataagtcagcttcctcaagttgtacctc

SEQ ID NO: 506 - DNA, 297 bp, Glycine max
  Clone ID: 2DC-01-Q1-E1-E10
tttgcatggaacattttttttatctcaaacaaaaattataacactctcccggttgttgttccattaaccatcaactttgctgaacgaatttgaaatgatgaaacatcttaatcgtctgacagattattgccaacagtaatctttgttcaagtgaaaatgaaacttgaggcagagctagttgacaacatcaagaaccagcttgcgagactttagaactgaccacctcaagcggcggtaataggcagcctgaagtagtgccagtgacagtacaaatatccatttaaatcccatcagttt

SEQ ID NO: 507 - DNA, 331 bp, Glycine max
  Clone ID: 2DC-01-Q1-E1-E11
ggcaaaacacaggcgggtacaaactgtaaaatgacaatacaacttacacactagcatccaggcatgaaaacccaaactaacaagataactgcagttctgagaaatctgaaaaagattcgaagtgaaagccataattgcttttaagttctaattgctagaacgcaactccggacgaacaaagtctgcatctggtggcacacaaatgtctactgtgggtctcagttcagcgcaaactttaatggctccgtgcactgggtctgacaggaacttgctgattaagtccctgttaacatgagttccattgtccacagccaccatggcctgccgggtt

SEQ ID NO: 508 - DNA, 268 bp, Glycine max
  Clone ID: 2DC-01-Q1-E1-E12
aacccagagaattcatcctggtattattagaaatatagatgccgtagtaattacatccattttgaagtttcaaatttcacccacaatatcgagttactgggggagagacaaagacatgaattttggactcaaagatctactcaaaagatgcccgatgcagacgaaatgttactctaagaataccaacacttgccttcgagaaaataatgtaaagcttccatattgaaatataatgtatctgtcagttacaacagaacttcagaaaggg

SEQ ID NO: 509 - DNA, 383 bp, Glycine max
  Clone ID: 2DC-01-Q1-E1-E2
ccagtaatagtatttaatattataagcagagattcataattcagattagccgaactttatacagaagcgaccagttagccaaacattaaaaaaaaaaaaaaagaagcaaccatgagcttaacacacccatcacaagtccaaaacacttgaacttgctgaaaggcaagacatgaccactttattctaaggatgtttgtttaacacaaaacaccagagtgcacgaaaaccatcacagacataatacataagtttttagctacacattaatagtttaacattattcctaattaagggctatctctgcttgaagcttgctctcccaacacctcacttgcaaatgcaagggttgcaagagcagtttggtccacatttgcagccatcgt

SEQ ID NO: 510 - DNA, 389 bp, Glycine max
  Clone ID: 2DC-01-Q1-E1-E3
aaatgaagactgtaaagataaatacacactaaaactctactataacaagaacatgtagcaatgtttctctcggtaataaattggggtcttgaaaaatcagatattgcacctaggatcatccaacgaacatagtaatcatcaaaattttgatactacaaaagccactaattcattttattgatcagttcgttgatgagatcctcacggttccctgtgtctccatcttctttgaatgaggtttttgattctttcaatccttcaactggcttgttgagctcaaagggccacataaatctaacaacttccttaaagtgtggaccagcattataaatctgatgaaccatgtcttctatgcatacaataccgaactttcctaattcctgctcaat

SEQ ID NO: 511 - DNA, 391 bp, Glycine max
  Clone ID: 2DC-01-Q1-E1-E4
ttaatcaaaataaattgcaaattaatacatagtacacttcaaaatccagcatgcatttattagtatattcccataccctgcgggtgaaaatttaaggacttacaaaacattaagaaacaagacccttttgcaattcacactgactgatacagatgcagatagccactcttaactatctagtatcctagctacaccgctgcaaagtagtctttgctaagtttagggtctggtttcatggacttctccccaggcttccacccagcaaggcaaacttcatctgggttctcctgcacatactgttaggcctggaaagttccctttggcccgtcaacacttccaccaattgccaagttgttaatggtagaatgctgaataaccccttccttgtcaa

SEQ ID NO: 512 - DNA, 375 bp, Glycine max
  Clone ID: 2DC-01-Q1-E1-E5
aatgataatattaattagttctatttatttaactcacaataatacatggcatcgttgggcaacaatggttgatagttagttacaaacaatattataaagatgtaagcaaaaaaaaaaaagggcacgatattctgaatcatgattcttcagctggtggtacctcactcagatccagtccctcttcaggcaagtctgaagtaaatggtcccaggatcccatcaccgctgatagtcaatccactctcagactggaacctaagcatgtctgcacgagccatagcttctgcttgggctattctctgtctgaatgtctgagccatctcctccgcctataacaaaaaaagttcagaattatgtgagtgaattctccttcaaa

SEQ ID NO: 513 - DNA, 385 bp, Glycine max
  Clone ID: 2DC-01-Q1-E1-E6
cttaaattacttttcataaatgtttagggtatatgtgtagttgattgtttttatcaattaagtttgtccagtacaggggtatagtataaaaagttgtcttttgataaagttaattgataattaaactattttattcaaaaaagttaaggtggactagtctagttgtgttagggatttattgtggatcacttttatatatcataggattaattttgtgcacatggttatacggtgcaccctctgtatcagattttttactcatcttcttcgtagctttccttccactccgttcttgtaccaccctcccggctacgacctccacatcctcgtcttcatcaccaacaataaagaccaccgtgtacacgtatatagtcaatggggaaaa

SEQ ID NO: 514 - DNA, 389 bp, Glycine max
  Clone ID: 2DC-01-Q1-E1-E7
ccttcaaatcttctcagcatatatattacttgaaaataaaaccaaaaaccatagtcatctctttaaagaacaacctcgaacgggggaaagaaaaagaacaccacaatgataaattgacttaactagctaaattataggttcttaaaaaaattaagaccacataacttatccagccttcaaatacacatcaaaatgatatggcaaattgctagctcaacggcgactgcaaggtagcaaaacccatgaaagttgatacattctctaagcaaccagagtgctagcagttgttgattcgtacttccagactggtgggagcttcttagtcttcttgtaatagcgagcaagtcggtggattctgctctcaacaagaatcaacctgaacttggagt

SEQ ID NO: 515 - DNA, 390 bp, Glycine max
  Clone ID: 2DC-01-Q1-E1-E8
tttaataatttaactttaaagagaacttcatgatcatcaaccatccaaggatttaagacgaaaggaacaagtacaagcctcgggagtgaattaggaagaaaacacaaggaaggaaaaccatacacagaagaagattccagagaaattcaataatacacaatttttttttttttattttcatttccccccctctagtagtcagtggtgggaagctgctcgtgggtgtggctgataaagacaacctcgtaaacaaggccagcgattccaccaccgatgagaggcccggcccagtagatccagtggttggtccaggtccagctcacgacagcaggcccaaatgtcacagcggggttcatggccgctccagagaaggccccacccaacaaaatg

SEQ ID NO: 516 - DNA, 337 bp, Glycine max
  Clone ID: 2DC-01-Q1-E1-E9
attaatagatccattaacatagaaaagaatgcaggtctacgttggtcagtttcacatggccagccctacattacattattaatatcaacccccttaacacttttaacatacactagtaccccgacagtaccgatctctatccctctgcgtgtcatataacccgaaaagaactgctgcgtatcagaatccaacgcagcttcgttaattttgagaattcctattcccttggttgggattattggattgagtaggttgccgagtggtggttgtgcgtgtgcgtgtaacaacacccggccaagagcgggacgtacagtgcattcccccatcaatgctggcg

SEQ ID NO: 517 - DNA, 391 bp, Glycine max
  Clone ID: 2DC-01-Q1-E1-F1
ttaacagaaatgcagatacattcattttgtaataatttatatacaatattgatattgtttgcatcaaccaaaaacaacaaaccggtacatgatgcaaggcatgaaaaaccggtatacattcaaaatatagaagcaaaaaaacaaaaaactgctaactagagaagtaaaatgccgaagccagtagttttggcctttttcttccttcaaagcaaatcgtgttatgcttcggtattaccaaaacatatcactggaaaatttcctaggatgtcataaacctctatagaaatcaacaacctcatataatgatattttaggcatataaagttcgcattgaaaatagaggcactagagtagcagtatcttttgatagcaatcaccaagggaaccatct

SEQ ID NO: 518 - DNA, 272 bp, Glycine max
  Clone ID: 2DC-01-Q1-E1-F10
agataaataagataaatgttgatttgtatcctttcagctaaatttctagcgtgacaagaaacacacagggatcgagaaaagacagtagaacatttgagaactccaccattcacgcaacctgttttaatgaaaggaatatctgtcatgaaaaatctagatgaagagaaaatgatcagatgatgcggcggcacagggtaatcccatcacccacggggagctggcaaatctcgatcctcgaatcttgagccagatacttgttgagctccatcaca

SEQ ID NO: 519 - DNA, 269 bp, Glycine max
  Clone ID: 2DC-01-Q1-E1-F11
ccaaattcaaacagttgcaggattgaatagatcttaaaaccaatgtaaaacaccgcctgtgagaagctttcatatttatggcagaaatggtgatcaaaatagaacccaaacagatgagcatagactatcagagaaacaaaatttgagaacttataagaaaaaaaaaaaactctaacaatctcttcaggtggccttaaccgctttagcagcagtagcagcagcttgccccctaagacgaccagtcctcctagcagcaatgagaccaacct

SEQ ID NO: 520 - DNA, 365 bp, Glycine max
  Clone ID: 2DC-01-Q1-E1-F12
ttaatattataagcagagattcataattcagattaactagccgaactttatacagaagcgaccaattaccaaacatttatatagagagatatatataaaaaaaaggcaaccatgaccttaacacacccatcacaagtccaaaacacttgaacttgctcaagggcaagaaatgaccactttattctaagggtgtttgtttagacacaaaacaccagagtgcaacataatacatactacataattttgaagttttgaaactacatatagtttttatcattatttctaagggccatttctgcttgaagctttaactccccaacacctcacttgcaagtgcaagggttgcaagtgcagttagctccaca

SEQ ID NO: 521 - DNA, 349 bp, Glycine max
  unsure (1)..(349): unsure at all n locations
  Clone ID: 2DC-01-Q1-E1-F2
aatccaaaatcaaaatcaacataagagaatgtggctgcaatgtacagacaaagtagcaaagagagaaacagaaatgcaggcaaggggtcctgttgattcgcaaacgcagtaacagcattgttttcagctaagaacataagacgaaataaaatccaacaaaatgtatcaaaacatcaaaaaggagagaccagtgccactaacaactgggtgtcctatttgacaacataagcaattgtaaaagcaacggaaacaaactaggtttaacgcactacttggatctctgtctcatcnttcggggcttcctcttcagcctcctcatacgcttcgtcttccacttggccctcatcgc

SEQ ID NO: 522 - DNA, 322 bp, Glycine max
  Clone ID: 2DC-01-Q1-E1-F3
ggaaagatgaaagaaaatcaaccaaatctagataggtccaagttgaacaaaagtattgctactaggtgcagggttttacaaccatgtgatgagttatatactttaataatatacaattattactcacaaacgtagaccgtgcatctactccatttacaagcaaaactgagggaagggcacacctagaactcaatcgttagttttctttgatttgagctgtaacccaagtagaacaagtcccaccgaggtaaatgcaaacaagaaccttgaggaatagaatatagcaagcaatgctccctttaaagacttagcaagcagcaaa

SEQ ID NO: 523 - DNA, 316 bp, Glycine max
  unsure (1)..(316): unsure at all n locations
  Clone ID: 2DC-01-Q1-E1-F4
cccctgtaagagcatttaagaattaaaaaaaaaatcatgcggccacatatactatacatcacatgcagcacatggtttccattantgttgttgtacatgaaaaatgacaagaatgccatgatagttctattcttgttttgaactaaactatcataaaagctgaactgctgctatggcaagtattttttcccgcaacttttgtgtaacagctacacgcacagtcaggacactaacaacaagacctgtgattcggaccttcacaattggctcatcaatgggcaccaattcaagagttccatcaacagccccaaccaag

SEQ ID NO: 524 - DNA, 366 bp, Glycine max
  Clone ID: 2DC-01-Q1-E1-F5
cttccatcattccttaactcccacaaggtttggtcctgtagaatctgacccatttcatcattgggcgaaaagtacgaaaaaaatcagatcgatttttcgaccaaaagtactatgtgaaatcctcggttttttcctctttctctatccctatctcgtaggtagagcgtttgaatcaatagagaaccctttcttctgtatctgtatgaatcgatattattacattccaaaattccttcccgatacctcctaaggaaccgaattggatcccaaattgacgggttagtgtgagcttatccatgcggttatgcacccttcgaataagaatccattttctgaaagatcccggctttcgtgcgttggtgggtc

SEQ ID NO: 525 - DNA, 394 bp, Glycine max
  unsure (1)..(394): unsure at all n locations
  Clone ID: 2DC-01-Q1-E1-F6
tttttgcctgttctaatcagtgaaatagtcaaatgtgattgaagcaaaagctccagctttcacttgcagttttccacggtctggttatctagggaaaaataaaaacaaaaaaacactacaactgaaaaagatataactttccggaatataacttccgctcactctttatccgttttgcaaacttcctagagttcatcatgtacaccctcttccttggtgtcttctccagcttccgtctttgattcagcatcggagtcattgccagcttcatcagcatcttcctcttcctcatcagcatcagagtcaactgggtcatcctttgattcctcctcttcnctcttcttctcggcctcctcaaatgctgccttctcagcatccttgtgcttgccccatg

SEQ ID NO: 526 - DNA, 389 bp, Glycine max
  Clone ID: 2DC-01-Q1-E1-F7
acagatcaatgatcatgcctttattatcaacgaagtccagttttttgtcctgctttgttaggacgtgaattccatatgcattggaactctagaccataaactttatattctatatatagacttgccccgttacataaaatactatagtatacaaaaattgcactatcacttcacttacgaaaagaaaaccaccacaaaccagaatactactattagcgacactcgtctccattttttttccccttaggagcaatgcagggtgaccaattttgcgcaccacatggaaatcatagatacacttcttgcaaagtcaacagtgagctgaaaagaaagaaagaaggcccaccagcggggcattgatatatgtagtgggctcagactgctgaaag

SEQ ID NO: 527 - DNA, 359 bp, Glycine max
  Clone ID: 2DC-01-Q1-E1-F8
acatgcaacaaaatttattcaaaacaattgacttatccatatacatggggttgcgcaaaacaaactacaagcaacaaaattgattcaataaattacacaaaggagcctgcaagctaatatgattgaaattgggcaaaggcaaatatccttacaggttaccaagattaggatcctatgtgatggaaaggaaagaaacataaattggtagaaataaataagactttagaccttccatccctgtatcagcaacttcctctataaaatggcacaaagaaaactttaaaccctcaatttaccacatcactatcccctgcgtcaggtccttcttcaccatccactacaccttcctcctcaacctc

SEQ ID NO: 528 - DNA, 293 bp, Glycine max
  Clone ID: 2DC-01-Q1-E1-F9
ttttaggttaaacttgtatcattttacatacaggcacgtaatcaccgtttacaacaatttcaataaagataccagcaatccgccgggttggttcacgtccatcggaaaaagtcatatctcttctaagcagtagtttaaaatcttctcccagttcttctagactatacatatatgctgattgcaagagcatgatattggcttcacgttaaacactccggaaagtagtgtgcactgccagggtatcagaattcaatagctcaaatcaaacaagtgctgaacaacactttgaaaat

SEQ ID NO: 529 - DNA, 385 bp, Glycine max
  unsure (1)..(385): unsure at all n locations
  Clone ID: 2DC-01-Q1-E1-G1
agggtacaaattcatgtatttgtaaattatggagcaacatattatagttgcatatattttgaaagaccaaaatagaaagagtgccctgcacaacanttttananaacaattgtaactatgatgaaaattggtcaatgctcacaccaaccgacatttcctgaccaattcatataattatttgacgacagacacgtcatgagaacctttctattcgtccacacttcacacagttttggacttgaccggggcaggaagcaactgatagcaagatattagagacgaaacaaatccaaaagccccagttacgcgaggagtaactgtcttgggtgccaattgaagcagtcctactgctaccacagtatcaattcctgctttgataagtgat

SEQ ID NO: 530 - DNA, 326 bp, Glycine max
  Clone ID: 2DC-01-Q1-E1-G11
cgtccggactaaggaacattactttactgaatcaaaggtagagagaagagcaacaaagagaatcagagagaaacagaactcatatttcacatttgatcagaagcaacacaagatccatatctctataaaaactcacaattacatacaccacacaaaacacaaaattaaccattaaccaaccacatagaactgtttgttctttttttttttcccctcaaaggaaaaaacgaaaacaaaaaacaaaaactttcttcccaactccccctagtgttgtgcagcatactgattaataagcgagagagcattgctagtaaactgagcaacat

SEQ ID NO: 531 - DNA, 372 bp, Glycine max
  Clone ID: 2DC-01-Q1-E1-G12
gacataaatctttgtaatttattttatttctatactaacgaaataaaacttactagtagtacataaaataaaaattgtgaacaaattgcagatcaatctaccttggcactagatattcagaaagagaacataataattaagaggaggatatagtgcgtgtggtgtggtgctttacttcacatgttcagggcagattgggaaattcacgagcacttctattacctcactctcactctcaactctcatttccctcgggatctctaaatctggaaatctgcgcccttattcctactattttccttccttttcgtgggttcatgcaattactatcaaagcaacaacagttgaaaagatgagaaagcaagtgcacat

SEQ ID NO: 532 - DNA, 382 bp, Glycine max
  Clone ID: 2DC-01-Q1-E1-G2
tttaccgaaatatggtgttatctaaaagacaattataagttgacagaagcaatggcacgatagctattaatctccaaggacaagggtatgcttcgggatataaacattacaggggtaacgaaacaatacaatcaaaatattcaagcaacaacttatccaaagagctgccttcggatctctggaagctttttacggaacactacatcaagtcgtgcatcaagagtattttcacacacaatctttccatcacgagaagccaacaccaccccaccagagcagtagagatcatgagaattgtgatgagtgggtccaggtggaagatagacttggttgtcaacaatgatctctgggggatcaacatttgctttctcagcatactcct

SEQ ID NO: 533 - DNA, 388 bp, Glycine max
  Clone ID: 2DC-01-Q1-E1-G3
ttataggaaatcttgacatttttctaacaactacaattaaatattgatacaagcttgtgataattgtcaatatatatatgtccgggagaagcataaaaatcctaggaataatttagcttctacatactctggctacttggtttacaattcataataaaaaaaaccagcactaaaagcatctagagttcttcaatcctatatagtttccttcaaagatggaagaattttccttacggataccaacgataacatcaatattaaatctgacaaatgctgctccttgaaactcagccaaaacttttcagtgacgaaatcaaggttataactgtgatctccaagcattatggttaatgctttcacaggaagaaaaaaaaaactctacaggaat

SEQ ID NO: 534 - DNA, 323 bp, Glycine max
  Clone ID: 2DC-01-Q1-E1-G4
gaaacaaggctcattcatacagctgaagaagtttcgtcgtaaaacgaaccgggaaagtaaagtacaagtaatttcacaaagtatcttatcatcgccaccaaaaaagcaagcgcaggggacttcttaattcccagctatcataaaaatttaacagactccgactaatctaaagctcatcgtgagaatcgtcctcgtcttcttcgcctgatgcaccaccaccgcctggggctcctccagatctctgatacacagcactaatgattgggttgcaaacgggttcaacctccttcagcttctcttcataatcttcttttcccatactc

SEQ ID NO: 535 - DNA, 325 bp, Glycine max
  Clone ID: 2DC-01-Q1-E1-G5
aaaatgaaacacatacgcgttagtgaaagactataatttcaaaaaaattaacaataaaaatattacagtaccataaagaggaaatatacctctcctcaaatttcagaccatctccatctcaaatatataaatatcaataaactataaaattatccaaatacgcaggtatccagtcttcgcaagcatctttaacacgaagaacagtgaaacatttcaatgacactctaaaacttcctttcacccttgttggttaattcccgaaaagaccccacaaaaaggttttttctgcctcaaaatcttgagatcccaactttgtttgccgggt

SEQ ID NO: 536 - DNA, 394 bp, Glycine max
  Clone ID: 2DC-01-Q1-E1-G6
ttgcacaaaatgataataatttaactttaaagagaacttcatgatcatcaaccatccaaggatttaagacgaaaggaacaagtggaaccctcgaaagtgaattaggaagaaaacacaaggaaggaaaaccatacacagaagaagattccagagaaattcaataatacacaatttttttttttttattttcatttccccccctctagtagtcagtggtgggaagctgctcgtgggtgtggctgataaagacaacctcgtaaacaaggccagcgattccaccacccgatagaggcccggcccagtagatccagtggttggtccaggtccagctcacgacagcaggcccaaatgtcacagcggggttcatggccgctccagagaaggcccacccaac

SEQ ID NO: 537 - DNA, 375 bp, Glycine max
  Clone ID: 2DC-01-Q1-E1-G7
gacagaaaaacattttgaattagaatgaaccagaatacaataatgtgatgtgcacaacaggggccagtcatgtgtacaattagaaaacaagtaatggtagatccttcagcctatattgttgggggagggaaatgtagtctacgatattaacaatgagactccaatgtccgctacttgcttggcgcggttgtacaatttgactgctgatcttgatcttcttccatttcaattgatctgaactccaagaaaagggcattttaattccaactgtcaaataagccgtgcctttttaaggtcagaaacaactccacgatcttcagtacccctatcattgtatataaccttatctatgatgccatactcaacagcttcact

SEQ ID NO: 538 - DNA, 376 bp, Glycine max
  Clone ID: 2DC-01-Q1-E1-G8
acacgaaggcaatgtggaaaacaacacaaataatacaacgacttcatggtgcactaatttttacgtcctcgtttttaatgaaatgtttacacttcttctttaatacattaaacaacttaatagacatatggacacactggccaaaacgatgacattggtgttttctattttggcatcccttacgaagatctactccgccttctataataatttctgtgatgcttgacagttgcaatgaactattcaatacttgtagctgctccttcttgacttatgatgtttctcacgatgatcagaataatcagatgaataagaatgctcataatatctacttttttcacttccatgatatccatcaacagcactagaatccttc

SEQ ID NO: 539 - DNA, 316 bp, Glycine max
  Clone ID: 2DC-01-Q1-E1-G9
ccattgaactgttttcatatttgtcttcaaagcaaataacacgcaatgttctgaaatccataatcccacatcacagggtaaaacataagaacagatcagaaataccacaatcacatacacaactccgattatctatctattatgcctaacacatagtcaggcagataaggcttgccacttgagactccaatcgctcagaaaccatgaatcttgatatgatccttcttcacgataccagcctgtactaggaaagtagaaacattcttcctctgatcaccttgaagttgaataacctgtcctagttctgggtcctgaa

SEQ ID NO: 540 - DNA, 202 bp, Glycine max
  Clone ID: 2DC-01-Q1-E1-H1
gaaaggaagcatatgaaatacataaaacattaaagtaaaactttacatgttaccacggcgtatatcaaattccatcaggggaactgggttcctgaacataataaattcaatacacaaacaaaccaaaattacaaattaaacaattaatattcaaaatccaagataaattgtccaaatgttccaagaactcaaacacatcaca

SEQ ID NO: 541 - DNA, 367 bp, Glycine max
  Clone ID: 2DC-01-Q1-E1-H10
atccagaatcaggaaatcaaatacacaggtgaaaaatattggtgacgacagacaactgttcagatacggtgataatatatatatataccaaaattttggcgatctgaaagccagcgcccacttgggaatatttcgtggaagtgtaacaaataagccccaatcttaatttcaaaaagaccaaaacaaggcatgggaaagtgatgaatgtaaattctatactttctaatctgatctaaattgcactcgttaaaaactctgttcttgtactatcggttctagaatcaacatcattagctttaccactttgcacatcaaatttggatgttataactcctgcaatactcagtggggtattacttaaagatac

SEQ ID NO: 542 - DNA, 152 bp, Glycine max
  Clone ID: 2DC-01-Q1-E1-H11
aaaatcaaagagaccatatgtaagatacataacaagaatccaaacacacccttcaatcacatatccatatgtgtcgagggatacatctcagcaattcaacatggacaagtaatgaccacccttcgaccatgattattaccactaaagctgct

SEQ ID NO: 543 - DNA, 330 bp, Glycine max
  Clone ID: 2DC-01-Q1-E1-H12
gtccacaaaatataaatctttttcaagtatgcccaagtcaatgatcagagagaaaataaacagactaaattaaaacgaaaactcaaaaacttaaaagccaactatatttcagtatttcccaccttgcttctacccctgttgaaagtaacaaagtaagctgctctgcaacaaagtagatctgaatttacaagacaggaaacgaccaaacaagtaaaataaaaagagagaaaaaaaaaggcttagagaaggataaacccgaacaaaaaccaaaagatataagcatcttatgcagaaaaacctaaaaaaccccaaaaaccctagaggagtaaa

SEQ ID NO: 544 - DNA, 337 bp, Glycine max
  Clone ID: 2DC-01-Q1-E1-H2
taatgtttgagtaaccacatatattctatttcatccatttgaggaagtttgtataaaactacagatagtgtaggcagtgtcctacggctggctgaaaagagatacttataaggcaaaatttaaaaataaataaataataaccatagatagcaatgaatacaaaattaagccacaagccacatgaagtaagttgtccaaaaagtgactgcaactgaggccaaagcatatgtccatagcatgataacagaacattcaccttcaccagctccaaacaattgcgcgattgtgcctgcagaaagcgaatgtttgaatatatagttatatcaaaataagttta

SEQ ID NO: 545 - DNA, 345 bp, Glycine max
  Clone ID: 2DC-01-Q1-E1-H3
aaaggactgatccaaaattcaatatgcggcccatggtctaattccatgacgagaaactgtgaagctcaaatatactatcctcctaaaaggattagatgttgaaatacaagtaattccaatgaaagacaaactctctcgagtgataattccttggtatcttataaggagcattattcaaaattgaagctacacttctgtgggcaaaccatgggaacctactaacaaggacagtagccaagaaagatcgatggtctctaatttaaggatgagttagccaatgccttctcctcaaaaagctcttctgcggtcaagtccaacttcttccttgagaactcatcattggga

SEQ ID NO: 546 - DNA, 285 bp, Glycine max
  Clone ID: 2DC-01-Q1-E1-H4
aacttcaaatggataacatattccaactagttaaatatgattcaatgcgtaacactgcgtaagaggtacttggagaactcaatgtaatcaaaaatagcaaaaccatagtttatcataacaacagccgtcataatatagcaaacaaaaactacatatgatgattaaacttcaccatatctctctatcgaaagcaacttatacagctgctgccttagcagcactggaaagcttggatctcctcttggccaaactctcactgcggcggtctctctgctccttcaacct

SEQ ID NO: 547 - DNA, 241 bp, Glycine max
  Clone ID: 2DC-01-Q1-E1-H5
gacacaacataggaaagatgattattatccaaataaccgatgacatcacaaacactgatatatgggaacaagtagcaagcgggtttctaaaaacaaagattctcaattcaaggtattttcccaatatcatagtttttaaaacttgcaattcctcccgttgccatgatctccaagtcccacaattgtagtttacactgtgagtgaagacacaatgtcacaacactggacatattcattgatg

SEQ ID NO: 548 - DNA, 344 bp, Glycine max
  unsure (1)..(344): unsure at all n locations
  Clone ID: 2DC-01-Q1-E1-H6
agaaaataaaaattaaagaattgagattcagggccaaaacagaagtacaactgttcaagcatctgaccaaggtctagggcataaggggttgccgccttatgtggcagcagtctgaaaactaaaagtctacataaaactgtaagaagaaaatgccctacagttcttcagggccccagagaaaaagaagggggaaatgaagaaaattgaacaggtaaaagaaaacataaaattagacatggctttctttcactagtcaagtcatctgcactgcactaatggcggcctactggttgcctcaggcanctgcttggattggccattcgattcgaagccacgaccccttc

SEQ ID NO: 549 - DNA, 296 bp, Glycine max
  Clone ID: 2DC-01-Q1-E1-H7
tttgaaccataatatttaagatgtcaaatagaaacctaataggtaaatactaacttgttgaagagactacatcaatcggaacgagctcttcaacaatgctcgttctgtattcagagtaccacaaaaactaaacgctactatgtctcaaggccaaatgtaattgttcaatacaccaaagcatgaccttcatacaaaaacttaactttcactttcacttttaaggaagtgagggctaatcaagcgagcaatctctagcatctcaacttgatctttccctgcaaacaccttcttcagct

SEQ ID NO: 550 - DNA, 274 bp, Glycine max
  Clone ID: 2DC-01-Q1-E1-H9
aaatgtagccgtgaacaaactttattatgagcttatagttactgtacatctatgccaattatttttgcagaggtgctggatttaggaattgttacataaagaatcccatctttgacctgtgccttaattttatcaaactcaatattttctgggagggctatcctgtggttatatctaccatagctattggcaggccagtcttcattgccatttgctcgaccttcatgattctcttcgagtgccttctctgccttcaccaccagcatgttctctt

SEQ ID NO: 551 - DNA, 262 bp, Glycine max
  Clone ID: 2DC-02-Q1-B1-A1
ggaagacaaaggggttgcagtcagaaagactaagaaaagcaaagcgaagccgaaacaacctcaagaagttgccggagcctagatacccatttttgacattttccccttttctgatttgtaaaactaattcttttgctaatttatgtacacaaatatttagatacatgcatatgcaagaaggtatgtatgagcacgaggcatatgtgcgtatataaattttgaatggaaaaattgtatttcttattttggaaaaaaaaaatta

SEQ ID NO: 552 - DNA, 420 bp, Glycine max
  Clone ID: 2DC-02-Q1-B1-A10
ggaaaactttttacgggtacttactggacgtcatgagacatctgttccaaggtccaaacgacttcttagtgatgagggaagtcatattcttctgtatatgacagggcatggaggtgatgagtttttgaagtttcaggattcagaagagcttcaaagtcacgatttagctgatgctgtgaagcagatgaaagagaatcgcacgtttaaggagcttctgataatggtggacacctgccaagcctctactcttttttcccatcttcattcagcatgtgttttggcaattggaagtagtatgatcggagaacattcatattcacatcagttggattcagatgttggcgtttcagttgttgatcgttttacattttacactcttgctttcattgagaggctgaatatgtatgacaatgcctcgtt

SEQ ID NO: 553 - DNA, 401 bp, Glycine max
  Clone ID: 2DC-02-Q1-B1-A11
gagggaatccccccagaccagcaacgtctcatcttcgccggaaagcaacttgaggacgggcgcaccctcgccgactacaacatccagaaggaatcaacccttcacctcgtcctccgtctccgtggtggcatgcagatcttcgttaagaccctcaccggcaagactataaccctagaagtcgagagctccgacaccatcgacaacgtcaaggctaagatccaggacaaggagggtatccccccagaccatcagatgctgatcttcgccggcaagcagctcgaggacggacgtacccttgctgactacaacatccagaaagagtcaactctccacttggtgttgcgtcatcgtggtggtatgcagatcttcctcaagaaccttacgggtaagactattaccct

SEQ ID NO: 554 - DNA, 392 bp, Glycine max
  Clone ID: 2DC-02-Q1-B1-A12
aaagaaccctctcacctagctagctatcaaactaccgattcatagcactcttctcttcctcacttatgcgaaacgcaaacatggttctcgttctccttttccttatggcaatcttctccgccatgaccactccgtcaacctccgcgatcgacaccttcatcttcggcggctgctcccatgccaagttcacgccgggttccgcctacgaaaacaccgtcaactccctcctaacctcgctggtcaactctgcggccttcgccaactacaacaacttcaccgttccagcctcttccgacaccgtctacggcctcttccagtgccgtggcgacctccccaacgaccagtgctcgcgctgcgtctcgcgtgcggtcacccagctcggcaccctctgc

SEQ ID NO: 555 - DNA, 384 bp, Glycine max
  unsure (1)..(384): unsure at all n locations
  Clone ID: 2DC-02-Q1-B1-A2
ctcaagtgtgaagcttcgtgaggcactttggtgtctgagctgaaggaacaaccttattaacatgaaaggctacaaggtttggacctcaaccttcaacagcagcaccaccaccaccttcatccctttcaataataatctctccccaaattacccgttaacccctccatcctatactgcttcaaactgcttcccatccttccaaagccaaagaccaaaacttatagctcagaatttcaaaccccacattcttctatgcacctctctgcccagtccacaggcaagcagtgcttccacagctcangctgaggagcatgangttgaaattgcaaagggttacactatgacacaattttgtgacaaaatgatagatttccttttgaatga

SEQ ID NO: 556 - DNA, 395 bp, Glycine max
  Clone ID: 2DC-02-Q1-B1-A3
gaccacgctcaaaacctagttacttcttcagtgtgcgtaccctcctcaacactaaaccctctctgtgtccctctccgttaaacccttgacggcgtgcggacctgcttcgacggtggcggcaccatggttctcactaccgagggcgcgacgaactccgtcgaggcggtggcgttcagcttcctaaccgacgacgagatactgcggagcagccgcgtgaagatgacgagtcgcattctcgtcgattttttgctgcaccccgtgcctgatggactatacgacgccgctttgggccctttcgaatacaagtctctttggtagtcatgtggtcaaacttctaaacattgcccaggtcattttgggcacaatgaactcgtttcccctgactacaaccctct

SEQ ID NO: 557 - DNA, 302 bp, Glycine max
  Clone ID: 2DC-02-Q1-B1-A4
taaaagaacaaataacaatcaagaaaaactcaagttatctataaccaataaatgcgacaaataaaaaggctttacaaaatataacataccacaagcgtggggaaagtaacaactccaattcaatccataaatagaataaacatcaaacgcaggggccctccccatctcataaccccattccccggacaattatttccccccgtttttcctggccttcaaaaatttccccaggatttccctctttaagaccttggaattcaaccagctaaaatctttccccgggaaaaaattttttcccccca

SEQ ID NO: 558 - DNA, 319 bp, Glycine max
  Clone ID: 2DC-02-Q1-B1-A5
gtccaaatgaaatgcttcactgctgatactccataccccaatccccacccaaacctctcttgaatgtacacaacattcagtgtagcggctaaagtgccaaatgcagtgttaaacgaccaccagttgaagtatgaaagttttagcacattttctttgggtctgaagtcatcgaattggtcagcaccaagagttgacatgttgggcttcagcacgccactgccaatggctacattgtgtgtgcaatatgaaactgatttcagaccagacatcagcatttgtaagaagaagatgataaaactttagcaagacttattgagac

SEQ ID NO: 559 - DNA, 312 bp, Glycine max
  Clone ID: 2DC-02-Q1-B1-A6
gaacaagggaatgtcttggaagctagggtaatctatgacagggaaagtggacgatcaagaggctttggatttgtgactttcagtagccctgatgaggtcaacagtgcaattcagtccttaaatggcgtggacttgaatggcagagctatacgagtctcattagcagattccaagcccaagcagttctgaggatttagcttttcgtctatacccgagagaggatttcggtatttgggacttgggagttatacagctgcaagatgtcattggcaaaaacagtttgggaaagaaatacacttacatgcattgaga

SEQ ID NO: 560 - DNA, 389 bp, Glycine max
  Clone ID: 2DC-02-Q1-B1-A7
gaaggactttaggttgggatttgggaattagggttattcgcgtggcgaagatgattgaggtggttttgaacgatcgattggggaagaaggtgcgcgtgaagtgcaacgacgatgataccatcggcgacctgaagaagcttgtggcggctcagactggcacaagagccgacaagatccgcatccagaagtggtacaccatctacaaggatcacatcactctcaaggattacgagatccatgacggcatgggtctcgaactctactacaactaaacacaacaaggtgtgttttatgcgtaatatactatgtgctgggaatgggataagcgctaaatgtaattctgacttgccgaaagtcccatgatttgaaataatgtacacctccaaatg

SEQ ID NO: 561 - DNA, 349 bp, Glycine max
  Clone ID: 2DC-02-Q1-B1-A8
gctagtttatcgtgaggagaatatgaagttgtttgttttctttgttgctgcagtagttttggtagcatggccatgccatggcgcaggctaccaaaggttccctctccgaatgaaaactggctatggtgagcgttcttcggaggtaaaatgcgcaagttttaggcttgctgtggaagcacacaacatccgagcctttaaaaccattcctgaagagtgcgttgaaccaacaaaggactacattaatggcgaacaatttagatcagactctaaaacagttaaccaacaagctttcttttatgctagtgaacgcgaagtccatcacaacgacatatttatattcggcatagat

SEQ ID NO: 562 - DNA, 346 bp, Glycine max
  Clone ID: 2DC-02-Q1-B1-A9
aattcttcggttattccaaaaggtaatggctttatggctattgcttcttcggatttcaccacgtgcgggatcagggaagatgatcttcttctggattgttggttggtcaacgcttcaaaacccgattttgatcctcctttggaactttcgagccctggactctgtatggctagtgagtgtggggttgatgagtttgctttcaatgtgagtgtgctcaatgagctatctttgacgagcgtgtgtgttagagaggatttgaggatttgttcgccttgtgggtcaaattgttccaatcggttcttcttgtctagtgaatgttctacgaatgctgatagagtttgcactg

SEQ ID NO: 563 - DNA, 408 bp, Glycine max
  unsure (1)..(408): unsure at all n locations
  Clone ID: 2DC-02-Q1-B1-B1
ctcgtggttggatttccatctattgcatgccacctcgcccagcatttaagggttctgctcctatcaatctttctgatcgtctcaatcaggtgcttcggtgggccttgggttcaattgagatctttctaagcaggcattgtcccttgtggtatggctacaatgggaagttgaagcctctgatgaggcttgcttatattaacaccattgtctacccgtttacctcaatcgcattgattgcttactgtacgcttcctgcattttgtcttctcacaaataaatttattattcctgagataagcaactttgccagtatgtggttcattcttctctttgtctccatttttaccacttcaattcttgagcttangtggagtggggtcagtatagaagactggtggagaaatgaac

SEQ ID NO: 564 - DNA, 297 bp, Glycine max
  Clone ID: 2DC-02-Q1-B1-B10
cagaaataagtttcgactactagctcacattaaggatcatatcctaatgagttcagttgtatattcttgatgtgtggtctccaaaaatatggtgtgagaatacagttcatcacgttgagggcctttttctctagtgttagttttatttgtcagggaagtgatatcaattatacatccaaggagacacatcagaagtttccagaataactaccaaatagttacaagttgacttacacatgtccttccttggcatgtaaactgctaacgtgtgtcagtgtgatgatgcgtgtgatcatt

SEQ ID NO: 565 - DNA, 310 bp, Glycine max
  Clone ID: 2DC-02-Q1-B1-B11
ggcttggtgattatctcattgaacagggtctctaatcctctatttatgtcttgctatcgtgcatatttcattggcttctgtacgagtttttgcatcgacctcgactgtaatgctttgattgcagtgtaataatattgttgggtgggtatcaaaagtcacggcatgtgcgtgttgccaagaaaaagtgttttggtgcttgagaaattaggactataactctctatcgttgtacttttttttgcggagtccctgtatacattagtgagttaaaattataatgttatggtactatgtttctcacaattcacat

SEQ ID NO: 566 - DNA, 153 bp, Glycine max
  Clone ID: 2DC-02-Q1-B1-B12
gttgcaggcaatcaaatgccaaaaattagtttgaaaatttagtgaactagaactgaggtggagtaagcaaataatgatgatatgatgaatagattgttcttcaaacttcaattttggcctgaagagcggttaagataaaagaaaaaaaaacag

SEQ ID NO: 567 - DNA, 336 bp, Glycine max
  Clone ID: 2DC-02-Q1-B1-B2
gcaacaaatggtgacactttcttgggaggagaggattttgataatgctttattggattttctagtgaacgaattcaaaagaactgagagtattgatctttcaaaggataagcttgcattgcaaaggcttcgggaagctgctgagaaagccaaaatagaactgtcttcaacatctcaaacagaaattaatcttcctttcatcactgctgatgcatctggtgcaaagcatctgaacatcacattgactagatctaagtttgaggctttggtaaaccacttgattgaaaggacaaaggcaccgtgtaagagctgtttgaaggatgctaacatatctatc

SEQ ID NO: 568 - DNA, 233 bp, Glycine max
  Clone ID: 2DC-02-Q1-B1-B3
ggagatgaaagggctcagaatgcacgtagcatatggaacaggcctcttaagagcgtttatattagtgattgtggggagctgagagtgacaaagcgttccctcacgccttctttgccataatttatttccatgtatgtatagattatccgatgggatttcatgttactggtctatgtaaaatcacactcacatattctttgagagtaaatgatgatgaataaaaactttacttt

SEQ ID NO: 569 - DNA, 341 bp, Glycine max
  Clone ID: 2DC-02-Q1-B1-B4
gtccaactgatcaaggagaacggtaatttaagccaacttgaaggtgaccatgagaagagtgcagagcaggagaaaatcaacggtgaagtagttgcagctgagacatgaaatgagatgaaatgaaatgcttgagttatcacagatgaatattcccttcctcaagttccatatttctgtatcatgtgtttatgctatctctcctgctttgccaatatggagtccataatgctcttgaaaaatatggtactcccttttttgtggttggggtgtgtgcaaatccatcgttttgttatctgttgttgtgaagttgtggattccaaaaatgagacttaatggcatgc

SEQ ID NO: 570 - DNA, 343 bp, Glycine max
  Clone ID: 2DC-02-Q1-B1-B5
aaaactcaacatctactacgaccaagtggagggccacgtgtcctacgaggggatgaggttcgcctcagcggacctgatcacatggcgaaactccttccgccaatacacaaagagcacgaacaacatgagcggggttttcacggggcagcacgggttggtgttcgatggcgatcacgtgaaggatttcgaaaaagatgagagaggtggggtttttgatattgatgtgaagctttactttaacattaggtttaggcttggtgacttcatacgaagtagctcaagggttacggcgaagtgcgagcttcaggttcctttggtttcgacgggagtgtttcttcccacc

SEQ ID NO: 571 - DNA, 299 bp, Glycine max
  Clone ID: 2DC-02-Q1-B1-B6
cggagtcgttgcagagctgcgcgtcgatctagaaaatggcgaggataaaggtttacgagcttaggaacaagacgaaggcggagctgctgaaccagctgaaggatctcaaggcggagcttgccctgctccgcgtcgccaaggtcaccggcggcgcccccaacaagctctccaaaatcaaggtggtgacgctttcgatagcgcaggttttgacggttatttcccaaaagcagaaagcggcgctgacagatgcttacaagaagaagaagtatttgccccttgacctacgtcccaaaaagacc

SEQ ID NO: 572 - DNA, 417 bp, Glycine max
  Clone ID: 2DC-02-Q1-B1-B7
gttgtcaatggcagggtttcgaagctcgttgcccttttctgcgctaattagacaggtcgagcaagagatggaaactgtgatgaaggtgcttcagcctggacccttgggaatcatagagcacaagttttccgccgacgaaattcgcaaggctaatgccacggtttctaaagcagtgaccaattggcgaaccaatgcgatcctcgaagactacaatcacgttttaaaagactatattcacaacaagtgaagccaattttagttcctcccgccaaattttgacccaaggttacttccattttcctttggtgtgtgtgtgtgcctatttgtttagatgtatgatcgttattgaggtgtttaagtattgtaaatgccggttacttgattataagtttgtatgaagttattcaatagtatctg

SEQ ID NO: 573 - DNA, 390 bp, Glycine max
  Clone ID: 2DC-02-Q1-B1-B8
gaaaaaatggaacctgaaaaattatatgattccgtcgatttcatattgtcacttcaaagtaaaaatggaggtatacctgcgtgggagccagtaagatctcaaaaatggttggaagatcggcaattcaaagtttagtgtttttcaaaagtctatatccagagtataggaagaaagagatagagaatttcattaacaaagcagtacaattccttgaagatgaacaatcaactgatggttcttggtctggtaagtggggagtttactccacttattcttcctggtttgcacttcgaggtctagctgcagctggcaagacttatacaaattgtgtaacaattcgcaaagctgtaaaatttcaacttccaatacagactgaaaatggtggttggg

SEQ ID NO: 574 - DNA, 218 bp, Glycine max
  Clone ID: 2DC-02-Q1-B1-B9
acaagtcacaactcgcaaaccacaatgcctaagcagatccacgagattaaggattttcttctgacggcgcggaggaaggatgcaaggtcggtgaaaatcaagaggagcagggatgtcgtgaagtttaaggttcgatgctccaagtacttgtacacgctttgtgtcgttgaccctgagaaagccgataagttgaaacaatctcttcctcccgggtttga

SEQ ID NO: 575 - DNA, 306 bp, Glycine max
  Clone ID: 2DC-02-Q1-B1-C1
cacacttccttccttccttccttcggattctaaactcaactccaacacactcaaatccagacaccaaacagaaccaaattctctgttctcttctttctcaagatttcaatgctcaattaatccctcaaatctttcttccttttttctctttcgaacgcccactcctttctctcttaattattattattattatcattctttctttcatttttcattccaaacaaacaatttgtttttttttttcaattcgatttgcttcagcgtcgaggagccatagtcgatttgtgtcacttctgtctgatcttc

SEQ ID NO: 576 - DNA, 419 bp, Glycine max
  Clone ID: 2DC-02-Q1-B1-C10
ttcagttccaaacaaaacccatcaaagtctttctccctcagtgatcatatattcattcagttctatacaaaatcctcaaaaactcttcctcgctgccatgaccatggaatacagaaccttagaactcaacatcatatccgcaaaggacatcaagaatgttaatctcttctccaagatggacgtatacgccgccgtttcgctctccggtgaccctctccaccctcagggcgccaccacccacgtccacaaagacgccggcagcaaccccacgtggaactaccccgtgaaattctttgtcaacgaatcgctggcgaaggaaaatcgtttatctcttgagatcaagctcatctccgaccgcaccctcggcgacaccgtcatcggcaccgtccatgttcctctcagggaactcctggataacc

SEQ ID NO: 577 - DNA, 260 bp, Glycine max
  Clone ID: 2DC-02-Q1-B1-C11
ccgacatattgaagagaattacagttccaaaactcggcagcacctcaagaggctctgataattcctttcgggtgtactgacaaggaaaatacattaccttctggcaattttgtttacattaccttcctgtggatggtttggagtgttaaaatttcatttataatattgttactccatacggaaatgcttataatgtgaataatgcctatttatattttactattaagctgtgataagctcatttattgaaaaaaatcaat

SEQ ID NO: 578 - DNA, 420 bp, Glycine max
  Clone ID: 2DC-02-Q1-B1-C12
gcactagttatcttgtcctaatagaattagagcaccccttcagaaaaatggctcatcctcccacacaatcgcagtctagagcagccaataagccaaaacgctcaaaccttcttcgttgcattgccattttcatactagccttgatcatccttgtgggcattgctgtgatcataatttggctagttttgaagcccaaaaggttggaatacactgtggagaatgctgcaatccacaacttcaacttaaccgatgcaaatcacctctatgccaactttgacttcaccataagatcctacaatcccaactctagagtctccatatactatgacactgtggaggtgtcagtgcgttatgaggaccaaactctagcaaccaatgcggttcagccatttttccagtcacataagaatgtgaccaggc

SEQ ID NO: 579 - DNA, 329 bp, Glycine max
  Clone ID: 2DC-02-Q1-B1-C2
ctcacggctagcaatcatgtcttctcgcttagatgagtgcttgttggaggtggatgggtacggtgatggcgatggaaaggcgaaacccaaattcctgataaggaatctcagcagagtttcggaggatggggttcccatcctcaaaggcataaatcttgagatcccagagggtgtgatcgtgggagtgataggccccagtggtagcggcaagtcaacgttcttgagggcccttaaccgcctctgggagccaccctccgcctccgtcttcctcgacgcccaagacatctgccatctcgatgtcctctctctccgccgtaacgtttgcatgc

SEQ ID NO: 580 - DNA, 288 bp, Glycine max
  unsure (1)..(288): unsure at all n locations
  Clone ID: 2DC-02-Q1-B1-C3
gagcgggccctcactgtcggccgcgacgagtgcctcgccgtggtgaacctcgtccgggggcgccggaactgctgcctgcgcctaggcaaggaggcgagtctggtcaagtttgatgcctctggggatcagttcttcatggcggtgaaggagaaggtctccgtccaccagaccgaggatgcgaggattctgttcgaattggaatgcccaaagcctgttctctgtgctacacctgctaagaatggacttctttatactggtggggaggaccganatatcacagcatgggac

SEQ ID NO: 581 - DNA, 311 bp, Glycine max
  Clone ID: 2DC-02-Q1-B1-C4
ggctgtgcgatcactcatctcacctcttctcatcaacgctgcgaaagacaatggagctgacaccccagcagctgagccaatacaacggcacggacccatcgaagccgatctacgtggcggtgaagggccgcgtctacgacgtcaccaccggaaaatccttttacggccccggcggcccctacgccatgttcgccggcaaagacgccagcagagccctggcgaagatgagcaagaacgacgacgacatctccccctccctcgacggcctctccgacaaggagatcggcgttctcaacgactgggagaacaaa

SEQ ID NO: 582 - DNA, 313 bp, Glycine max
  Clone ID: 2DC-02-Q1-B1-C5
ggcaccgcgacccgcgccacctcttcagtcttcattcttctcacttcacgaatcacgaccgaaccgtgaaaaacgttcccagcctcccaccgtgccacctcttcaggtgtaaaaatggggttatctgccaagaaatctagaaaaagaggaaaaagggacagtgattcagatgaatacgatgatatggagtatgaagaggtggaggatgattacgatgatgatggtgaggaagaggatgacgaggaagaacatggagaggaagtaacagatgatgaagatgggacaggagagcatggtgaatggaataatgatg

SEQ ID NO: 583 - DNA, 376 bp, Glycine max
  Clone ID: 2DC-02-Q1-B1-C6
ggcttatttgggtcgtgttataaatgccctggctaaaccaattgatggtcgaggagaaatttcagcttcggaatctcgattaatcgaatctcctgctcccggtattatttcgagacgttccgtatatgagcctctccaaacaggacttattgctattgattcgatgatccccataggacgtggccaacgagaattaattattggagacagacaaacgggtaaaacagcagtagccacagatactattctcaatcaacagggacaaaatgtaatatgtgtttatgtagctattggtcaaaaagcatcttcggtggctcaagtggtgaataccttacaggaaataggagcaatggaatacacaatggtattacctgaa

SEQ ID NO: 584 - DNA, 394 bp, Glycine max
  Clone ID: 2DC-02-Q1-B1-C7
catttctccatttccattttctctctcacttttcaagaatcgtaagctatgggaaagtcttacccaactgtgagtgctgattaccagaaggccgttgagaaggcgaagaagaagctcagaggcttcatcgctgagaagagatgcgctcctctaatgctccgtttggcatggcactctgctggaacctttgacaagggcacgaagaccggtggacccttcggaaccatcaagcaccctgccgaactggctcacagcgctaacaacggtcttgacatcgctgttaggcttttggagccactcaaggcggagttccctattttgagctacgccgatttctaccagttggctggcgttgttgccgttgaggtcacgggtggacctgaagttccattcc

SEQ ID NO: 585 - DNA, 292 bp, Glycine max
  Clone ID: 2DC-02-Q1-B1-C8
gcccaatttagcataagcccagcatggccaccgcaacagcagcagccacctcgtccttcatggggacgcgcctcctggaggcccactccggggcggggcgggtgcaggcccggttcgggtttggcaagaagaaagccgccgccccgaagaaagtttccagggggtcgggctctagctccgataggcccctgtggtatccgggcgccaaggcgcccgagtacctggatgggagccttgtcggagactacggattcgacccatttgggctagggaagcccgccgagtacctgca

SEQ ID NO: 586 - DNA, 405 bp, Glycine max
  Clone ID: 2DC-02-Q1-B1-C9
gagagggctgtgtgctggtgccgggtcgaagatatcgtggacgcaggtggagacgggttcggcgatcacgtggaagtacccgagcgttgtgttggagggagatggcagtgtgggggagttttattctgtggctttgacgaataactatcaacaggccgatacatggacgaagatgatacacaaagggaagaacacaaggagtaggattatatcaaaggggatatcggtggggcattccaggaactgttatagagggctggttcaggttctgtccaaggccgagaatgcccgaaactcctcgcagtgtgactctatgctcattggtgacaatgcagctgcaaatacctatccttacattcacgtgaaaaatccaacagcaagaatcgaacacgaagctagtacgtc

SEQ ID NO: 587 - DNA, 417 bp, Glycine max
  Clone ID: 2DC-02-Q1-B1-D1
ggcaacacataaatgaagaagggtctctcctttgtgctgctgctgatccttgtgatcatccactacaaggtagtcaacgccaacaacaacaactgtgttacagaggattgcctcattggtcatagtttggagtcagagttctcgtttggctcccatgtggcaagaatgctctatgatgtgagccaatctgtgtctggccaaacagggaatagcaacaatgctgctgttaattgtccagaaagcaatggttatcgtagctgcttgccatctcaaaacggtggtggccctaaccaaaattgcggtgattacaccatgacttgctaagaaatatattaccagcaggtatttcaattctgaattcaaggttgtcatattattgagattgtcataatctgaagatgcgtgtaataattgttg

SEQ ID NO: 588 - DNA, 396 bp, Glycine max
  Clone ID: 2DC-02-Q1-B1-D10
gcagacttaacaacagcacaaagcgggttactgtctgttcaagctaccatctctctctctctttcttagtgcctccttgccagaagttaagatggcccaggaaactttcctattcacatctgaatcagtgaacgaggggcaccctgacaagctctgtgaccagatctccgatgctgtgctcgatgcatgcttggagcaggaccctgacagcaaggttgcctgtgaaacctgcaccaagaccaacatggtgatggttttcggagagatcacaaccaatgccaacgtggactatgagaagattgtgcgtgacacatgcaggaacattggttttgtctctgatgatgttggtcttgatgctgacaactgcaaggtcctcgtcaacattgagcagcagag

SEQ ID NO: 589 - DNA, 262 bp, Glycine max
  Clone ID: 2DC-02-Q1-B1-D11
gtttcacttgtgaaactaacaacaacacaaggccatcatcatggcaactgcttccccaatggcaagccaactcaagtccaccttcactaggactcttgtatctcccaagggcctctcagcctcttcaccacttcacctcgtgcattctagaacgcaatttagcttcactgtaaaggctatccaatcagacaaactaacctatcacgtgcatgatccattcaatcgtgactcattcattgtcatcatgcaatatccacttaca

SEQ ID NO: 590 - DNA, 412 bp, Glycine max
  Clone ID: 2DC-02-Q1-B1-D12
agaagtttctctttcgaggaatggggtggtggagaaggtggcaaatgacaattcaagtgaataatggagaacaacaacaacaaccacaacgtgatcgtcgctaatcctcaagattcactgtggatgatgaatttgaggactggggaaacaatggattctggatcttatccggagcgtccatgggagccggattgttcatattacatgagaacaggcctttgtagatttggtgcaacgtgtcgatttaatcatcctcctaacaggaagctggctattgccactgcaaggatgataggcgagttcccagaaagaatatggcaaccagaatgccagtactatctgaagacaggaacatgcaaatttggagccacatgcaaatttcatcatcctaaagatcaggctggaattgctg

SEQ ID NO: 591 - DNA, 322 bp, Glycine max
  Clone ID: 2DC-02-Q1-B1-D2
gggttttcttgtggattttctttcacatgctgccttagttggatttatggcaggcgctgccatcattattggtcttcagcagctcaaagggttgctggggcttagtcactttacctccaaaacagatgtagtatcagtgttggcatctgtttataagtcactacataatcaaattgcccctggacaaaaatggaaccctctgaattttgtcctgggatgttcattcttgattttcattctaattacccgatttattggcagaagaaatagaaagcttttctggttgcctgctatttctcctcttctctcagttatactatca

SEQ ID NO: 592 - DNA, 310 bp, Glycine max
  Clone ID: 2DC-02-Q1-B1-D3
aaacagcctacctactgcaaaagcttatgccacaaggacaatcctgttcttgaaagatgatggtactttgaagccacttgctattgaattaagcagaccacatccagatggagataatttgggtcctgagagtatagtggtgttgcctgcaactgaaggtgttgatagtacaatttggctattggccaaggctcatgttattgtgaatgactctggttatcatcagctcgtgagccattggttaaatactcatgcagtgatggaaccatttgccatagcaaccaatatgcatcccagtgtgctccagcct

SEQ ID NO: 593 - DNA, 421 bp, Glycine max
  unsure (1)..(421): unsure at all n locations
  Clone ID: 2DC-02-Q1-B1-D4
cccgccgcaactcactgtcttccttctctagggtttttagctcccccaatttcttcgctcaacatggttcttcaaaatgatattgatttgctaaatcctccggttgagcttgagaagaggaaacacaagctcaagcgtcttgttcagtcaccaaactctttcttcatggatgttaagtgccagggttgcttcaacataaccactgtctttagccactctcagactgttgttgtatgcggaaactgccagactgtcttgtgtcaaccaaccggtggccgggcaaggctaaccgagggatgctcctttangaagaaaggagactgagtggattgccatctttttttgtttgtgattggagagtttcagtaatgccttcctttgttttggttatgatgatatgttaattttgttaaatttgtaa

SEQ ID NO: 594 - DNA, 414 bp, Glycine max
  Clone ID: 2DC-02-Q1-B1-D5
gcaagaaccgccgcagcaagagcgtcaccgatgaggacgtggacgagctcaaagcctgcatcgagttgggcttcggattcgattcctcccccgagaacgagctcgatcaacgcctctccgatactttgcccgctctcggcctctactacgccgtcaacaagcgctacaacaactccctcgtcaccaaaaccacgccgtcctcctcctccgccgcctccgattgcgacagcagtccttccccccacggcagtccccactccgccatcttcaccaccggtgataaccctcagacggtgaagacgaggctgaggcagtgggctcaggtagttgcttgtgcggtgcgtcaaagttcaaatgtgtgattgggaagcaaatgaagaagcagggttgtcaaacgttaaacataaaatagaa

SEQ ID NO: 595 - DNA, 321 bp, Glycine max
  Clone ID: 2DC-02-Q1-B1-D6
gagacacacacttttgcagtcacattgagaatggggcgtgttcgcacgaagacggtgaagaaatcctcgcggcaagtgatagagaggtactactcccgcatgacgctggacttccacacgaacaagaaggttctggaagaggtggccatcattccctccaagaggctccgcaacaagatcgcggggttctccacccatctcatgaagcggatccagaagggtcccgtgcgtggaatctccctgaagctgcacgaggaggaacgcgagcgtcgcatggacctcgtccccgatgtctccgcaatcaggaccgacaatatcaag

SEQ ID NO: 596 - DNA, 262 bp, Glycine max
  Clone ID: 2DC-02-Q1-B1-D7
gtgatatgatactgggctaggggagtttgtataaatatttatgttgtgaaccgtattgtttggtaccggtaaaattatctccatatagggtcacgaaactgctaagatcatgttgtttatgtggtatgtaattctgtatgtatgcttgttagacaaagtgctgttgtccattgttatgttatggcaacttggcagagtaaatgaattggtaatacttcagtgtaaaattttattgcctcctaaaaaaaagaaagaagaacac

SEQ ID NO: 597 - DNA, 320 bp, Glycine max
  Clone ID: 2DC-02-Q1-B1-D8
agttagtgggcttgacagaagctggcgaaaacccccgggtgtggctgctaaactcatagattgtaaatcatctgatgggatttattacatcgagtattcgctgcaaaatcccggtgagagtcgcaggtatttatattcagctatcgggatggcatcaaatggttggtataacagactgtatacggtgacaggacagtatgtggaaggggaaacagacaagtatgcttcaaaagttcagaaggtagttgcatcatttaggttcatatgatgaacatggtcatgacgaggaagaaattttctcacagccctttctcatcctt

SEQ ID NO: 598 - DNA, 388 bp, Glycine max
  Clone ID: 2DC-02-Q1-B1-D9
attttggatttctgccctacgtgtgatgcaaggtgtggttaacttttttggtcgaatatcaatactcatagaccagaacacacaggctttccatttgttcatgactgcacttctccagctgtttgaccgctctggaatgttgtatggagagctagctagatttgtgttgcggttgcttgggattaaaacaaagtccaagaaggttcacccgccaggtccaaatggacaaccgttgcctggacctggacctggacctggaccacacaatccttccggaaatgtaaactacatcgaggcaccaaaggctgctcctagtggttcttgggacaacgtttggggaaatgacgcagatcaatgatacagtatgttgttctgctaaaagagtttg

SEQ ID NO: 599 - DNA, 312 bp, Glycine max
  Clone ID: 2DC-02-Q1-B1-E1
acgagaactatacgattcgattccgtgttttcaatggacaccttcttcaattctcaatcttcttcgtcttcgagaagccgctggagttacgagaggctcaagaatttccgtgagatctctccgctggttcagaatcacatcaaacgggtttattttacgttatgttgcgctgtggtggctgctgctgttggagcttttcttcatgttctgtggaacattgggggttttctcaccacgttggcttccattggaagcatggtttggttgctatctacaggccctgttgaagagcaaaagaggttgtctctgttg

SEQ ID NO: 600 - DNA, 380 bp, Glycine max
  Clone ID: 2DC-02-Q1-B1-E10
atttctttgagaaagcctatacaatccttggagaagggaagaaaaggagagtactggtaacattggaggggaacaacaatacagagccagaggaagagacaaattaagatttgggaattttcaaggacaagttggtcaatccaccagaagagctaaacagccctgcttctttgaattcatcaaaaaggtctaaacttccaaatgaaatccttcaggaattccagtcctacaatccctccaatgctttctccgttagctttggaaatgatgctttgctagcttattccccttcaaacaaggcctccattcatcactggttttgtgttttggataacatatactgcattttccttgggagcctatgcaacctaagcaagctc

SEQ ID NO: 601 - DNA, 347 bp, Glycine max
  Clone ID: 2DC-02-Q1-B1-E11
cgtcgtcgtcccgccgttcctctgccgtcgtcgcacgaacacccagcagagagcttcgaagccacgcaggcgggaacgagcagccatcgcagcgtcggcgttgcaatcggaaggttgcaccagaccaggccgtcgcgttgctttttagtcagctgactagagacaacacgagatggcagagaacagcacgtagctgctcgaatttgagcatatatgcgcacccctttcttcctgagaatccactcttcttgtttgtgatgatagctcagaatcatgacacataagcgacgagactcccccctcatggcacagtactcactgtgccatatcacccaatccaaatttta

SEQ ID NO: 602 - DNA, 258 bp, Glycine max
  Clone ID: 2DC-02-Q1-B1-E12
atcttgtgttagatttcgtgatctatttttattttctggcctacttgccttcatttattgatatcccaacgatgttacaactaccaataggttgttttgaaagtagtgaattacatggggtattgtatttattgtttcttttcttcactattgattcgggccattttgatgtatgataagattgggaaaatgaatgctaggattgtgaatgtactgtatcaagtaacatctcttgttggcagaaaaaaaatctagaag

SEQ ID NO: 603 - DNA, 421 bp, Glycine max
  Clone ID: 2DC-02-Q1-B1-E2
ggcatattaagaagagccagtctcttcaaagtgggcttgatcaaggcatcagggaagctgatgaagatcttgggttgtcgtgtgatggtgccaaaagccagaatgagtcaacaatttctattagcagaaggtatcatgatgcaaaccccattgatcagtatggaaataatccaaacgttgagtttcaagtcagttcaggtcttgcgaatgatggctcacttttttcaataggagacccaatgccttcagataaagatgcccatgaaatttctgatactccgttatctgttgaatttgctggtgacattcctgaccagacttttgttcctggtagcctatttctaaggaagtcacgttctttacccaatatcagagcttctatactttcttctgaaagagatgcttttaaacatgcattgtc

SEQ ID NO: 604 - DNA, 380 bp, Glycine max
  Clone ID: 2DC-02-Q1-B1-E3
gatttaggtcagaagatgtggagaatcaatcagcggattgtgaaattgatcgtggaacttatgaggaatcatgagacttcagaatcattggtaattgtggcaagttcttcagatttactactgcgagccacagatgggatgctggttgatggagaagcttgcactttaccacagttggagctattggaagcaacagctagagcagttcagccagtgctcgagtttggagaatctggattggctgtggcagatggcctttcaaaccttttaaagtgtcgcctctcagctacaattagatgtctttctcatccaagtgcacatgtccgagctctgagtatatcagttcttcgtgacattttgcatactggttcaatcagatg

SEQ ID NO: 605 - DNA, 412 bp, Glycine max
  Clone ID: 2DC-02-Q1-B1-E4
caggtcttagaacccttcttttcttcctcgtgtgcgtgaaaacgaagcaacgccacacgatggtgttctacttcaaagcgcgccctgaagccggcgatttcaccatcttcatgggcctcgacaagttcgagaacgaggaactcatcaaatacggttttcccgaagacatctggttccatgttgataaaatgtcttcagcccatgtctatgtcaggctgcacaaaggccagactctcgatgacctgagtgaggctttactggaagattgtgctcagcttgtcaaagcaaattcaattcaaggaaataaagtgaacaatgttgatgttgtttacactccctggtctaatttaaagaaaactgcttcaatggatgttgggcaagttggttcacaactcaaaaatggttcgaactg

SEQ ID NO: 606 - DNA, 372 bp, Glycine max
  Clone ID: 2DC-02-Q1-B1-E5
atctttcacaattttccccaacagaatcagcacccgaatttcccggatccgagatacccagaaggaaaagattaaaactttggtgttttcatcgatctctggggaaagatgtgttgtggggggagaatttgcatgctttgcacgtgtctggttctggtggtgatcgccatcgggttggtattcgggttcggagtgttcaagcatggattccacaagatcaaagacactgttagtttctgcgattcttgcggcggcggaggaaggcctttcatcggttatgcaccgccgccattgttctagttctcagcatcctcttgttccatttcgttcttgttaattgttctggggatttgtttgtttccctttataaat

SEQ ID NO: 607 - DNA, 336 bp, Glycine max
  Clone ID: 2DC-02-Q1-B1-E6
gagaatgcaagagttctgaaggaaggaatcgagagaacaggtcggtttaacatcatctccaaggatatcggtgtgccacttgtagccttctccttgaaagacagtagtcaacacacagtgtttgagatagcagaccatctgagaaaattcgggtggatagttcctgcctatacaatgccaccagatgctcaacacattgctgtccttcgggtggtgatcagggaggatttcagccgcggcttggccgagagactcgccgctgacatagagaaagttgtgaagctcttggacacacttcctagccccctcactaccaaagctgttcatatcacagct

SEQ ID NO: 608 - DNA, 410 bp, Glycine max
  Clone ID: 2DC-02-Q1-B1-E7
gggaggaatcggagtgattgttgaaaaagtggggtttagggtttttggtgggggttgtggaatttgtgattgaattagggttgttgagtgcatgagaggtggaattgtgttgttgtgatggatgtggaggaaactgagaagttggtgtctttggacccagatttgttgctgcttccggaggtgtctccttttgcactgaaatcgagtccttacgttgttgaggagctattcacacagtggctttcgcttccagatacttgtcgcctggttaagtcattgcttgctgatgcaaaggcaggagctcgtttgagtgcacttgagaactcaacagatacaaatgctctgtcaatcaactctctaccttccttgtttcctgctgggagtacaccaccactttcaccacgcagctc

SEQ ID NO: 609 - DNA, 351 bp, Glycine max
  unsure (1)..(351): unsure at all n locations
  Clone ID: 2DC-02-Q1-B1-E8
catcaaccatggcagggagattgacgaacgcagcatcgaggatcttaggcggaaacggcgtcgtttaccgatccgtagcttcctctcttcgcctccgctccggcatgggcctccccgtcggcaaacactatgttcccgacaaaccccttcccatgaatgaggaactcctgtgggacaacggcactgcatttcccgaaccgtgtatagatcgtattgctgacactgtcggaaagtatgaagcattggcctggctgtgtgggggattgagttttttcgcgtcgctgggattgttggctgtgtggaatgacanagcctccaagacaacgtttgcacccaaagtatatccatatg

SEQ ID NO: 610 - DNA, 393 bp, Glycine max
  Clone ID: 2DC-02-Q1-B1-E9
gtgactcgttcttcttcgtcgttatcttcttcttttgttgtttgtgtgtttgttttttctctcacctgaaaatgtcttgctgcggtggtaactgtggttgcggaagcgcctgcaagtgcggcaacggctgcggaggctgcaagatgtacccagacttgagctacaccgagtcaaccaccaccgagaccttggtcatgggagtggcaccagttaaggctcaattcgagagtgctgaaatgggtgttcccgctgagaacgatggctgcaaatgtggagctaactgcacctgcaacccctgcacttgcaagtgaggtgttggagagctaaagcttcaagcagaaatggcccttagaaataatgataaaaactatatgtagtttcaaaacttcaaaa

SEQ ID NO: 611 - DNA, 388 bp, Glycine max
  Clone ID: 2DC-02-Q1-B1-F1
cattccgctcaaagcctcacaatttaatccaagctacacgagagaaagtcatcggctcagtaatcatggctaacggttcagggatcacttccacgtgctggtaaggctatagggcaaacccctaaggtggccaatcaggataaaaaaaagaacccacatggccgcgcacacaagacgattcattacaatcgccgattcgtcaccgccgtggtgggattcggcaagaagatgggacccaactcttctgataactgaggccgacgctttcagaatatgttgctacactatttgatttatctttgttgtattttaattagttttaatttgtatcttttgattgtgttctgtgaacagtttttgttaactttaaatcaaaatttaaattttg

SEQ ID NO: 612 - DNA, 355 bp, Glycine max
  Clone ID: 2DC-02-Q1-B1-F11
gttttgtacagggagagaattccaaaatattatcgtaaaataaaactttttttttacaaaaaaaaaaaacgtgtgtgtgtgtgttagtgtgagcggaggcagatcggaagcgggaagttaggagatctgtgatagatggagggagttggggcccggctggggcggtcctcgacccggtacggaccggccacggtgttcagtggaccggtgcggcagtggaagaagaaatggatccacgtgtcaccctcatcagcttcctctaattccagcgctaataagcaggcttcgaatgcctcacatcttcacctctacaattggacccctctcacccagagccagaacaccaccaacaacg

SEQ ID NO: 613 - DNA, 419 bp, Glycine max
  Clone ID: 2DC-02-Q1-B1-F12
gcgaaagactttaggtttggaattgggaattagggttgttcgcgtcacgaagatgatcgaggtggtgttgaacgatcgactggggaagaaggtgcgcgtgaagtgcaacgacgatgacaccatcggcgacctgaagaagctggtggcggctcagacgggcacaagagccgacaagatccgcatccagaagtggtacaccatatacaaggatcacatcactctcaaggattacgagatccacgacggcatgggtctcgaactctactacaactaaacacaaggtgtgttttacgcatgatagattactatgatctgggaatgggatgaggcgccaaatgtaattttgacttgcgaaagtccctatgattttaataatgtacatccccgaatgaaatggggtattacataccgatgacacc

SEQ ID NO: 614 - DNA, 415 bp, Glycine max
  unsure (1)..(415): unsure at all n locations
  Clone ID: 2DC-02-Q1-B1-F2
ggaggagacaggggtacgccgttcaaagctagaggcggtggccgtggtggccgcggaggaggcaggggtggtggccgtggcggcggcagaggtggaatgaagggaggtagcaaggttgtggttcagccccataggcatgatggcattttcattgccaagggtaaagaagatgctcttgttactaagaatcttgttcctggtgaagctgtttacaacgagaaaaggattaccgttcagaacgaagacagttccaaagatgagtacagagtttggaatcctttccgttcgaagttggccgctgccatccttggtggtgttgacaacatatggattaaacctggtgccanagtcctttacctangagctgcttccggcaccactgtttctcacgtatcagatgttgttggcccaactg

SEQ ID NO: 615 - DNA, 397 bp, Glycine max
  Clone ID: 2DC-02-Q1-B1-F3
gctgagtatgctgctttggctaagaaccctgagaaggagtttttgaaaactattactggcaagaaggagaccctcattgaccttacaattatagaaatcctgtcaaggcacgcatctgatgagttctaccttggggagagagatggtggtgacttctggacttctgatgctggtccactagaggccttcaagaggtttggaaagaagcttcaagagattgaacataagcttatacagaagaacaaggatgagacgttgagaaaccgcactgggccagctaaaatgccttacactctgctctatccttctagtgaggagggattgactttcagaggaattcccaacagtatctctatctaagggctctctcattgaggttgctgtactactctgcctg

SEQ ID NO: 616 - DNA, 428 bp, Glycine max
  Clone ID: 2DC-02-Q1-B1-F4
aaccaccactaccttatccatttccactcctcaccaagccacaccatggcctcaaccaacgccctctcttcagcttccattctacgctctcccaaccgccagtctctgaccagaagagcgaaccacaacggaagagtaaattaccgtcaaccgaatagccgtttctccgtcaaagcctccgccaaagagattgcctttgaccagcattcccgctctgctatgcaggccggcattgacaagctcgccgacgccgtcgggctcactcttgggcccagggggaggaatgttgtgttggatgagtttggaagtcctaaagtggttaacgatggtgtcaccattgctcgcgccatcgagcttccagattctatgggaaatggcggtgcagctcttaatagagaagttgctagtaagactaacgactctgccgg

SEQ ID NO: 617 - DNA, 382 bp, Glycine max
  Clone ID: 2DC-02-Q1-B1-F5
gccgcagcaagtgatcgaagcgaaaagagagaaattcatcgtcgcagtaatcatgggtaaggttcatggatcacttgcacgtgctggtaaggttagagggcaaaccccgaaggtggccaagcaggataagaagaagaagccacgtggccgcgcccacaagaggatgcagtacaatcgccgattcgtcaccgccgtggtgggattcggcaagaagaggggacccaactcgtctgagaagtgaggccgaggcttgaggaatatgttgctactctatttgatttatctttgttgttttttatttatttttaatttgtatgttttgattgtgttctgtgaacggtttttgttagctttatatcaaacttgaaattttgcatacaaa

SEQ ID NO: 618 - DNA, 152 bp, Glycine max; identical to SEQ ID NO: 450
  Clone ID: 2DC-02-Q1-B1-F6

SEQ ID NO: 619 - DNA, 396 bp, Glycine max
  Clone ID: 2DC-02-Q1-B1-F7
gaaggttttcatgtcacttcaatggctactgctggaagtcgctggggtgttgttatgtctcgaaatgctggattcagtaaacaggtggttgaacttgattttctctatccaagtgagggcatccataaacgttgggataaaggttataggattacagcaaccgcagctacattggatcaatctgctcttatattaagtattccgaggcgcaaactcagtgatgaaactcaggaaactctacgtacatcgcaatttcccggcacacatgttaaggaaaaatggtcaaaaaacctttaccttgcctgtttgtgctacggacgcacagtatgctgatttccatgacattttaaagcattttattgacaagcggattatgagttgtcatctgccccacca

SEQ ID NO: 620 - DNA, 338 bp, Glycine max
  unsure (1)..(338): unsure at all n locations
  Clone ID: 2DC-02-Q1-B1-F8
caacgaaccactctgaagccgctcacgttatccacaacactctcaaccctccttaaaccctaaccaatccaaccatggcttcttcttccaccttcactgcaatgtccgcctgcaagctctcctcctccgccgccatctcctccttcccctcccgccgccgctccaacgccgtcgttctgtcgaggcgcagccgcgccgccagggtctccgccatggccaaggagttgcacttcaacaaagacggcaccgcaattaagaagctccagagcggtgtgaacaagctcgcggatctggttggggtcacgcttggtcccaanggaagaaatgttgttctccaa

SEQ ID NO: 621 - DNA, 399 bp, Glycine max
  Clone ID: 2DC-02-Q1-B1-F9
cgcagtgtctcactcaccccagtcacaccatggaggttgctacagcagcttctagcttcgcactcaacaagcccatgctggcattgccctcttcatctcgaactgtaaccccaatcagatgcatgaacacctccacctcccccgtcaggacctctctctctaccagcttcgtcgctccttacgccggaatctgcagcgcgtctagccctttctccggccacaagctccgtccctcctccctcaatccggcgtcgtttcttggctccaacgctaaacgaggcgtcgttaccatggttattccttttcaacgaggaagtgcatgggagcaacctccaacggacttagcttcttacttatacaaaaatcgaattgtgtatttgggcatgtctcttgttccat

SEQ ID NO: 622 - DNA, 418 bp, Glycine max
  Clone ID: 2DC-02-Q1-B1-G1
cggtgtgggtgtttgaatctggtgaaggatgtcaattgttccaatcaaccagggtgatgccaacggctccaaccccttcgcttcgtggggtcaattcgtggattttcctctccctccttccatctccggcttcttccccggcttgggattcggattcggattcggatcatccgtgaacacacgtgtggactggagggagactcccagagcgcacgtgtggaagctggtgcttcccggcttctccaacgatgacgtgctggttgagctccaagacgagagggtgctccaagtcagcgtggagagcggcaacttcgtcacgaggtttaaggtccccgacaacggtaacctataacaactcatagccaacatgcgtcacagggttctcgttgtcactgttcccaagtttcatcaacccact

SEQ ID NO: 623 - DNA, 401 bp, Glycine max
  Clone ID: 2DC-02-Q1-B1-G10
tcgaaataaaccaccgactgtacgatttgtgtctcgcatgtttcatccaaatatttatgctgatggaagtatttgtttggatatattacaggatcagtggagtcctatttatgatgtggctgctatactcacatctatccagtcattgctttgtgatcccaacccaaattctcctgcaaactctgaagcagctcgaatgtttagtgagaacaagcgtgagtacaatcgaagagtgagggaaattgtggagcagagttggacagcagattaagttcatccttatatgcatgggaagctttgaaggcatgaatttggttgcagtgatggcaactataagaatgattgtgcaaactcatcacatttatattctctgctgatatgaatgatagcatcatcttatc

SEQ ID NO: 624 - DNA, 406 bp, Glycine max
  unsure (1)..(406): unsure at all n locations
  Clone ID: 2DC-02-Q1-B1-G11
cccccaacggcgtcgtttcgctcaagctatcccgctggcccgacgaactcgcggtttccgcactgcagaagcacaacgagggtgggacccactaccgcgaattcaagcggggacaatccgcgttggcttttccgatgcggtttccgaggggctacggcgcgcagacaaaagtgaggacgtggatggaggagtttcagaagcttccttatgtttctccttatgtggattccacgaagattgatcctaacagcgatttgatggagaagcgtgtggttggggttctgcacgagattttgagcttgactctgcacaagaaaaccaagaggaactacttgaggggcttgagggaagagttcaaccttccgcataagtttacncgcattttcaccaggtatcctgggatttt

SEQ ID NO: 625 - DNA, 339 bp, Glycine max
  Clone ID: 2DC-02-Q1-B1-G12
caagccccactcaaccaccacaccactctctctgctcttcttctacctttcaagtttttaaagtactaagatggcatagacattcctatttacctcagagtcagtgaacgacggacaccctgacaagctctgcgaccaagtctccgatgctgtcctcgacgcttgccttgaagaggacccagacagcatggttgcctgcgacacatgcaccaggaccaacttggtcatggtcctcggagagatcaccaccaaggccaacgttgactacgagaagatcgtgcgtgacacctgcaggaacatcggcttcgtctcaaacgatgtgggacttgatgctgacaa

SEQ ID NO: 626 - DNA, 357 bp, Glycine max
  Clone ID: 2DC-02-Q1-B1-G2
cccaagcttcaatctgtgtcctttcattgcctttgctttccacatacatatagcaattgttaaattatcaatcatcgttactcttttttaacaacgggaatgaagatcagatgaaatgaaagatttaacattgtagccagatccctaacccctccctttacgcacccaaacgtttttgttaattccccccaacccaacgacacgcttcgtatctctctctctctctttcccgcacttcaataaatccaccacccagaaaccatggtttttctttttcataatcaaccgatggaggtggttctcgttcaaatgctgaggctggcatgggtcgctgccacgttacccatcatcgtcgct

SEQ ID NO: 627 - DNA, 429 bp, Glycine max
  Clone ID: 2DC-02-Q1-B1-G3
caaaaggccatataatttttttatttgaaataatgtccgggatcatccacaagattgaggagaccctccatgtgggagggcacaagaaagaggagcacaaaggagaacaccatggtgagcacaaaggtgaacacaaaggagaacaccatggtgagcacaaaggtgaacacaaaggagaacaacaccatggggagcacaaggagggacttgtggataagatcaaggacaagatccatggtgatggccatgacaagggtgagaaaaagaagaagaaggacaagaagaagaaggagcatggacatgaccatcatggtcatagcagcagcagtgacagtgattagatcttatatgttaagcaagtgtacggtacgatggtagtgaggagccagaatccctcttcctgctttatgatataatacaaataaaata

SEQ ID NO: 628 - DNA, 306 bp, Glycine max
  Clone ID: 2DC-02-Q1-B1-G4
gcaatccgcagaaagaccaccggaactggcaggatgaggtacttgcgtaacgtgcctcgccgattcaagagtggcttcagagaaggtaccgaagctgcacctaggaagaagggagcagctaccactgcataaacctgtcaaagatcgttgtttgctgggtacggacttacaagaatagattgcttttttgtgcttatggcaagtattttggaacaattatttttagagtctgattgctactttgtccttcatttaatttgtagttgctttatatttcaacaagatcataagacttattgattattc

SEQ ID NO: 629 - DNA, 239 bp, Glycine max
  Clone ID: 2DC-02-Q1-B1-G5
ggtggcccctttctctgtctcttctccctctgctcctgagtttaagactacgcagctttcatacacttcaatccctttttatgtgggcagctttcgcggcttcagagtgccacgacttcgttatccaagacgaagtcgcgtttctcttttcgggtttcggaatcaatcagtgtcgtgtttttagatactaggagctgcgttagcgacccttctcatagacttggtgatggtgtagcaag

SEQ ID NO: 630 - DNA, 365 bp, Glycine max
  Clone ID: 2DC-02-Q1-B1-G6
aatcaagttagagaggtgccgggcaaatctttcaccagtgttcaggatgaaaccaatccaatttgagaaggatgatgacacaaactaccatatggatgtgattgctgggcttgccaacatgagggcacggaattacagcattcctgaggttgacaagcttaaagccaagtttattgctggccggatcattcctgcaattgcaacctcgactgccatggcaactggtcttgtctgcctggaactctacaaagctttggatggaggacacaaagtcgaagactacagaaacacatttgctaacttggcactacctcggttttcaatggctgaaccatttccaccgaaaattatcaaccatcaagata

SEQ ID NO: 631 - DNA, 317 bp, Glycine max
  Clone ID: 2DC-02-Q1-B1-G7
gcaaagatgacaggtgggatgtttggaacgaaggggcaaaagataaaggggacagtggtgttgatgccaaagaatgtgttggacttcaacgccataacctccgtcggaaaaggcagtgctaaggacaccgccaccgatttcttgggcaaaggcttggacgcattacgtcatgcagttgatgctctcactgccttcgctggccatagcatctccttgcagcttatcactgctactcagactgatcgtagtggaaaaggaaaagttggaaacgaatcctatttggaaaaacatcttccgaccttgcgaacgttgggagc

SEQ ID NO: 632 - DNA, 318 bp, Glycine max
  Clone ID: 2DC-02-Q1-B1-G8
aagagatcgcagacacagagcagaatggcttctacccaatgtttcttgcaccaccatgctcttaccacccctgccagtgccagatccccatcactacgcatcttggttagcaccaagcctaaccagcttgtttgcaaggcacagaaacaacaaacaccacaagaggatattgatgtcagcccaatctctcgccgtttagctctaactgtgctcattggtgctgctgctgttggctccaaagtccaacctgctgatgcagcctatggtgaagctgccaatgtgtttggaaagccaaagacagacacagatttcctgcca

SEQ ID NO: 633 - DNA, 65 bp, Glycine max
  Clone ID: 2DC-02-Q1-B1-G9
ttgtggaaattttaaccgatcctccgacaacaatagatatcaataaaagagcaatacaatacaac

SEQ ID NO: 634 - DNA, 410 bp, Glycine max
  unsure (1)..(410): unsure at all n locations
  Clone ID: 2DC-02-Q1-B1-H1
caaacctaacgcagcatcgctattctcttcattccatggctttgcccaaccagcaaaccgtggattaccctagtttcaaactcgttatcgtcggcgatggtggcacaggaaagacaacctttgtgaaaaggcatctcaccggagaattcgagaagaaatatgagccaaccatcggtgtggaggttcacccattggattttttcacaaactgtggaaagattcgattttactgctgggatactgctggacaggagaaatttggtggcctcagagatggatactatatccatggacaatgtgctattatcatgtttgatgttactgcccggctaacatacaaaaatgttcccacctggcaccgtgatctttgcagggtctgtgagaacatcccaattgttctttgcngtaac

SEQ ID NO: 635 - DNA, 173 bp, Glycine max
  Clone ID: 2DC-02-Q1-B1-H10
cctacacaaactgtgtttgggtacagtttggaacaggaggaattttgacattcccaaaacctcatttccaacaacgttacttaagcaaccagctcacaaaatattaccacaaaaactacgcagcaattgatgacacaagcaattcaccaccctattacctcaacacaatcaat

SEQ ID NO: 636 - DNA, 406 bp, Glycine max
  Clone ID: 2DC-02-Q1-B1-H11
ctcatggccactgcgctttattcgactcattgtcgttcactcgctacttcctcttcctcgtcgtcgttgcaacgctctcctctgtcgtctagcctcgcttaccttcaacgcctcaccttctcacagcgctttctcccctccaaggtttctctcaaatctcaaccccaaacttatcagattcccgttctcacccagcagcaggaaggtagagtagcagctgctgtgacccctgttgataacggcacttctcacatgcagttgaagcctgacttattgtctgttaagtcaccataggagtctcgggctgaagacggttttgaaaaggatgaaaatgagtccagtgttagtattactgttgttggagcctctggagaccttgctaagaagaagatattcccggctctca

SEQ ID NO: 637 - DNA, 326 bp, Glycine max
  Clone ID: 2DC-02-Q1-B1-H12
gcaaaagagctagatgttgaaggaaaaaaatactatcaatttgagttcattgctcaggctccgaactatactcgtcatgctctcagcacagtctccattggcaatggtaagttttacaccttgacgacaggagcaaacgaaagaagatgggtgaagatgaaagacaggctgcagacggtcatagaatccttcaaaattttcgacgtttgataatgatcattactattaccaccatattagagatattaaactcttcagcgagaatgttcatttgaattttgagctttatagtatcaagttttacctgtttttttattaaaaaagag

SEQ ID NO: 638 - DNA, 333 bp, Glycine max
  Clone ID: 2DC-02-Q1-B1-H2
cagcattggatctggaaacgcgtggaagaagaagaaatggctcgcgcaggagggataacaaacgcagtgaacgtgggaatcgcagtgcaagccgattgggagaaccgcgaattcatctctcacatttctctcaacgttcgtcgcctcttcgacttcctcgtccaattcgaggctacgacgaagagcaagttggcgtctttaaatgagaagctggatgtgttggagcggagattggagctgcttgaagttcaagtgggcaatgcttcggccaacccttctctttttgccacatgatttttgtggtgtaagcactctccacctataatgttaaat

SEQ ID NO: 639 - DNA, 409 bp, Glycine max
  Clone ID: 2DC-02-Q1-B1-H3
cttcaacctaacgcagcatcgctatactcttcattccatggctttgcccaatcagcaaaccgtggattaccctagtttcaaactcgttatcgtcggtgatggtggcacaggaaagacaacctttgtgaaaaggcatctcaccggagaattcgagaagaaatatgagccaaccatcggtgtggaggttcacccattggattttttcacaaactgtggaaagattcgattctactgctgggatactgctggacaggagaagtttggtggcctcagagatggatactatatccatgggcaatgtgctattataatgtttgatgttactgcccggctaacatacaaaaatgttcccacctggcaacgtgattcttgcacggtctgtgaaaacatcccaattgttctttgcggt

SEQ ID NO: 640 - DNA, 257 bp, Glycine max
  Clone ID: 2DC-02-Q1-B1-H4
ctcatgtctgctataagtttatattgggagtcggaagaaggaaataatttattgtttgtaatcctggacataaagctcgtaattaatcatcaatttcaatatattaaccctaaaaaaaaaaaaatcagaaatccaaaaaaatggcagaaaataaattaaaagggaaaaaacaaaaggggaaaacaaagaaatgggtgcaaaaataaaatgaaaaacagaaaaaaaaaaagaaattaaaaaggggggcgccccaaaaa

SEQ ID NO: 641 - DNA, 278 bp, Glycine max
  Clone ID: 2DC-02-Q1-B1-H5
gtcctgcttcatcgatcttagctactgctgttgatgtttgtcagtatgttttttctctcacgtaagaaagttctgctgccgtgataatcgtaggtgctgcaccgccagaaacatgctgaatcaggtgcaggagcagcatgactgttcaaatacatattctacactgtggtcaaacaatagcgtcaacttgggcaaggtagtgacatcagttaacgctcaattcgacagtgctcaaattggtgttcacactgagaaagatggctgcaagtatagaacta

SEQ ID NO: 642 - DNA, 180 bp, Glycine max
  Clone ID: 2DC-02-Q1-B1-H6
atccattagaatttgcaaacagtgaatattgggaggtttttttttccaaaacaatgtgttacattgaagttttatttgcccgttttacgcaaattcccggattctctacatttgcaagcagttacttttattggcattaactacggaaggaagcaatgttatgttccaaaaaaaaaaaca

SEQ ID NO: 643 - DNA, 258 bp, Glycine max
  Clone ID: 2DC-02-Q1-B1-H7
ggagaaagagccagatatttggaatgcaatcaggtttggcacagtgttggaaaatgtggtgtttgatgagcatgatcgagaagttgattactctgacaagtcagttacagaaaatactcgtgcagcttatcctatagagtacattccaaatgcaaagttaccttgtgttgggcctcacccaaagaatgtcatacttttggcatgtgacgcatttggtgtactcccacccgttagcaagctaaacctggcacagaccat

SEQ ID NO: 644 - DNA, 152 bp, Glycine max
  Clone ID: 2DC-02-Q1-B1-H8
ccgccacttctgaatctattgaatcaacaatcatgtcggacgaagagcaccatttcgagtccaaggccgacgccggagcctccaaaacctaccctcagcaagccggtaccatccgcaagaacggctacatcgtcatcaaaagccgcccctgc

SEQ ID NO: 645 - DNA, 214 bp, Glycine max
  Clone ID: 2DC-02-Q1-B1-H9
ggaagaagggaattgccgttactaatcaggcctatcccttcataatgacagtaatgtcatgtcacggaggcacacaaaagaactgggttcttcgtcgtctgagtggaccgtgtgtctgagtttgggatcactggcctctgcagcactctgtgccatagcacacaagccattggacgtagaatttggctgaaactacctgccaacatgggccgtt

SEQ ID NO: 646 - DNA, 631 bp, Glycine max
  Clone ID: LIB4-01-H1_FLI
attcggctcgagaataaactcacccactaagcactacacaaatcacacagagttgcaagagaaagataaaagaagatggcgactcttgattccgacgtgcctatggttcccgccggcgagccctcgagcagcgccggtccttcttccaagaagcccaagcgcttcgagatcaagaagtggaacgccgtcgctctctgggcttgggacatcgttgtcgataactgtgctatctgccggaaccacatcatggatctctgcatcgagtgccaagccaaccaggctagcgccactagcgaggaatgcactgtggcttggggagtttgtaaccatgcttttcacttccattgcatcagtcgatggctcaagactcgtcaagtttgtcctctagataacagtgagtgggagtttcagaaatatggccactagaattatgatgtggttgagctcctcggacatttggaccatctatcctagattttgaatatttactgttctatctgttattttcgtttgcttgtgtactgaatttattatgttcaagaaatcagcttgtctgatggaatttgatatacgccgtggtaacatgtaaagttttactttaatgttttatgtatttcatatgcttcctttc

SEQ ID NO: 647 - DNA, 387 bp, Glycine max
  unsure (1)..(387): unsure at all n locations
  Clone ID: 6HA-01-Q1-B1-A1
gactangaaagttttcaaagccaagcaaatacgagctttacccaattttcttgctgttgaattttccactgttcaatcttcaaaatcacatttttctcgatcttcaccttctgggttgcttttttttttcttcttcttcttcttcttcttttgttttcgctatggaatcgaaaaaccctgcgaggtttacgctggggaagcagtcgtcgcttgccccagaacgccataacaaagaagcagagctccaaaaagatggggaagctgttgatcagggtgtgaggttgatgtattcggcattcgaaggcgatgtggatggaattcgcgaggcgttggagtctggtgtgagtgtgaattacaaggatattgataatcgcactgctcttcatg

SEQ ID NO: 648 - DNA, 366 bp, Glycine max
  Clone ID: 6HA-01-Q1-B1-A10
caaccctgacaagattccttttgttcctatctctggttttgagggagacaacatgattgagaggtccacaaaccttgactggtacaagggtccaactctgcttgatgcacttgaccagattagtgagcccaagaggccctctgacaagcccctcaggcttccccttcaggatgtgtacaagattggaggtattggaactgtgccagtgggacgtgttgagaccggtgtcttgaagcctggaatggtggtgacttttgcaccaactggactgacaactgaagtcaagtctgtggagatgcaccatgaatctcttacagaggcacatcctggtgacaatgtgggattcaatgttaagaatgttgctgt

SEQ ID NO: 649 - DNA, 360 bp, Glycine max
  Clone ID: 6HA-01-Q1-B1-A11
aatgtagtcccttaaattaacaagggaaccaaattggtttattcccgttccaacttaatggttgccccccggtcaaccggcaacggtccggtaactccggccacctagtgttatttttctccagcgggttggtgcgccttgtcaagcacagtcgaacccaagtgttttggatctagattttgacccagtaatgaagagtgggttctcttttttcttctcttgtcattttcttttctttgtcagatctacttttcttcggtaggcctttgttgtcaccaatgccaccattgtactcgtctccctttagcaagtctaacctagtggtcagttgctattgcctttgccagagccgtcacaccg

SEQ ID NO: 650 - DNA, 326 bp, Glycine max
  Clone ID: 6HA-01-Q1-B1-A12
gtgaggtggttgatttggtggtgagggaagaggtggagagggttaggggatacccaaagctggtggcgccggctacagtgggggctgacggggagtttatggtgggggctgcggtggggacgatggaggacgataaggagaggttggagcatttggtgaatgctgggttgaatgttgtggtgttggatagttctcaagggaactcaatttatcacttggagatggtgaagtatgtgaagatggtgtaccctgagcttgatgtgattggggggaatgttgtgactatgtaccaggctgagaatctgattcaggctggggtttatggg

SEQ ID NO: 651 - DNA, 143 bp, Glycine max
  unsure (1)..(143): unsure at all n locations
  Clone ID: 6HA-01-Q1-B1-A2
gtgctttgttggtgccaaaataggtattattaggcaccaaatccctacaataagtgatatgatgaatttgttgagtgttgcaaccctcttttgtaaaatcagttatgcacccaacgtcttcatgattcatgtacatanggact

SEQ ID NO: 652 - DNA, 382 bp, Glycine max
  unsure (1)..(382): unsure at all n locations
  Clone ID: 6HA-01-Q1-B1-A3
gtggttaacttctctgcacgctgttatacacgagggcttgtgagggatctcattaagtgtggtgggatgaaaaggaattgtgatagatcagccattttgatgtgtttgaaggaaaatggtcagtttaggcgtgcaccgcctgtggttcgagtanagaagatgtttgaattggttcagtctaaacttcctggggctcctcagtttcttctttgtctgcttcctgagaggaaaaattctgatctttatggtccatggaagaagaagaatcttgctgagtttggaatcgtgactcagtgtatagctccggacagggtcanatgacaatatttgactaatgttctgttganaatcaatgctaagcttggtggcctgaactcaatac

SEQ ID NO: 653 - DNA, 419 bp, Glycine max
  Clone ID: 6HA-01-Q1-B1-A4
atctcttctacgacgcaagcagcttctagttgtgtaatttctgcgtgggctgcaatggattccggtgtccagggttgcatcttagccactttaattctccacgacgaggaaattccagtcaccgctgagaagatcaacgctctgttgaaggcctctaatgtctccgccgagtcatactggcccagcctcttcgccaagctcgcccagaataagaacatcgaagacctcattttgaacgccggtggtggtggtggtgccgccgctgccgttgccgctcccgccgccggtggtggtgctgccgctgcagccgcacccgccgccgaggaaaagaaggaagaagtgaaggaagaaagtgacgatgacatgggtttcggcttgtttgattaggtcttttttatatagttgtagccagattttga

SEQ ID NO: 654 - DNA, 314 bp, Glycine max
  Clone ID: 6HA-01-Q1-B1-A5
gcaagcaagaggaaaaaatgggcaaaatgggcaaaattatgcttgttttgggtagcctcattggattatgctgtttttcaatcaatacctatgccttctcaccttctggatggaccaatgcccatgccactttttacgggggtagtgatgcttcaggaactatggggggagcttgtgggtatgggaatctgtatgcaactgggtatggaactagaactgcagctttaagcactgccttatttaatgatggagcttcctgtggtcagtgctacaaaattatatgtgattacaaagcatactctagatggtgcatc

SEQ ID NO: 655 - DNA, 366 bp, Glycine max
  unsure (1)..(366): unsure at all n locations
  Clone ID: 6HA-01-Q1-B1-A6
atgggtcacaacatgttgctgagactactaggaaatgtggaaatggagaaggatcaacaagcccttgcaagaggactcatgaagatcatcaagctagaaagttgagtcctctagaaagccgagcaatggcttgggatgaggccgaacgtgccaaatatatggccaggttcaagcgtgaagaggtgaagattcaagcctgggaaaatcatcagataagaaaagctgaaatggaaatgaagaaaatggaggtgaaggctgagagaatgaaagcattggcacaagaaaggtttacaaataaactagcttcgactaagaggatagctgaagagaaacgagctaatgcacangtgaagctgaatgacaaag

SEQ ID NO: 656 - DNA, 397 bp, Glycine max
  Clone ID: 6HA-01-Q1-B1-A7
attggatacaagggaaggaatgaatgatggttttcctagagctggaccaaatgattcgcttcttcctggtctttttgatgatgttgcgctgaattgtcttgcttgggctagtagatctgattatgcttcactagcatgtataaataaaaggtacaacttgctgattaggagcgggtatctatctgagttgaggaagaagctggggattgtggagctagagcatttggtttatttggtttgtgatccaagagggtgggaggtatttgaccccaagaagaatagatggataacattacctaagataccttgtgatgagtgttttaatcatgcagacaaggagtccttggctgtggggagtgaaatgctggtttttggtcgggaattgatggattttgcc

SEQ ID NO: 657 - DNA, 309 bp, Glycine max
  Clone ID: 6HA-01-Q1-B1-A8
gtgttgatggtcctggagctgtcacattagtaatcaagggacagaatcttccaattaagagtgataataaagaagtgcctctagttcccagtaacgaacagtacaatgggaaagactttcctgagaattattctgatgcagaattttttgtcatcaaatcttatagcgaggatgatattcataaaagcattaagtataaagtctgggcaagcacctttaatggcaacaaaaaactggatgcatcgtatcatgaatccaaggagaaacctggtgactgtcctgtatttttgctattttcggttaacacta

SEQ ID NO: 658 - DNA, 373 bp, Glycine max
  Clone ID: 6HA-01-Q1-B1-A9
atcttcacttctctctttctctcaaaacacaccaaaccaaccattcattcattcattcatagtttcattcaacaaatcaaataatatcaaacaaataaatgtcacctaacaatccttccacgattgttcccgacgcggtggctcggcactacacccatgtcgtgtccccgcaccagtgctgctccgccgtggtgcaggagatcgccgccccggtctccaccgtgtggtccgtcgtgcggcgcttcgacaacccgcaggcctacaagcacttcgtcaagagctgccacgtcatcctcggcgacggcgatgtcgggaccctccgcgaggtccgcgtgatctccggcctccctgccgccgtcagcaccgagcgcct

SEQ ID NO: 659 - DNA, 276 bp, Glycine max
  unsure (1)..(276): unsure at all n locations
  Clone ID: 6HA-01-Q1-B1-B1
agaaacatatggagatagcatgcataaagtttgcatgttggtcctgatacttgctatgtggtctctaaattgcttgaagangangaaactgatgcctggggaatanaaccatatgatacagaagatgctgataataattgcaaaacacttatacgtagaggcagtgtgcctgtgtctgatatcaagtttcctcttccatacaggccaaaatctttctctcttgtaattgtttcagatgctctggattacctgtctcccagatacctcaataaaact

SEQ ID NO: 660 - DNA, 365 bp, Glycine max
  Clone ID: 6HA-01-Q1-B1-B10
cagagctagctagctagactaaaatggcagaaactgcagtgtccttggctggtcagcatgcgcttccaaaaatatcagaagctgtcaaaatgctgatagatctcccaaacgaagttagacacattacagatgaacttgaaagctttcaagatttcatcaatgatgctgataaagtggctgaagccgaggaagatgatggaatgcgtcatagaataagagaaaaggtgatgcggctgagacaatcagcttttcgcatggaacatgccatcgatgaatataacatctcctgtgatgataaacaacctgacgatcctcgatgtgcagctttactatgtgaggctgttgccgtcatcaagacacaaatc

SEQ ID NO: 661 - DNA, 334 bp, Glycine max
  Clone ID: 6HA-01-Q1-B1-B11
gagaactaacatcagattttaagatgatagcaagagctttgacaatgacaggacatgccttggttaaaatggcgaaatgctctaacgattaccagtctgctattgagacttatcttaaagcactcactgatcaccgtaaccctgatcctttgatcaacacttaatgaagctgaaatggctaagaccgaactagatcatcaagagtatcttgatccaaagttggctgatgatcagatagaaaaaggaacttaactcatcaaacatcacaactatcctgatgctgtcacccattacgcatgagtctactcgaagtcatccatgtgatcctatggct

SEQ ID NO: 662 - DNA, 367 bp, Glycine max
  Clone ID: 6HA-01-Q1-B1-B12
gtacagcaaccttttgctatcggaggatctgggtccagttacttgtatggtttctttgaccaagcctggaaagagggaatgaccaaggatgaagccgaggatttagtaaaaaaggcagtttcactggctattgctcgtgatggtgcaagtggtggggtggtgcgaacagtcataaactcagagggagtgaccaggaatttctaccctggcgaccaacttccattatggcatgaggaaatggaggcccacaactctctgctagacattcttggtgtcccagagccgatgagcatgtgaagtgaagaagtttctgtgttcataatcgtttccggatagattatatcatgtcacctctccttcatgaact

SEQ ID NO: 663 - DNA, 414 bp, Glycine max
  unsure (1)..(414): unsure at all n locations
  Clone ID: 6HA-01-Q1-B1-B2
cgagggatcgtgagagggacggtaacaaaaatcccttaatttgcaaaaataaaaacaattctttcgcagagaacatgaacatcccggacggcgtgagcgtcaagttaatgccaaggtcatcgaagttgagggccccgcggaaaattggtgcgagacttcaagcacttgaatctcgattttcagctcatcactgacgaaaacggtaaaaggaagctgaaggtggangcctggttcggttctcggaaaacatccgccgccattcgcaccgccctgagccacgtggagaatctgatcaccggcgtcaccaagggctaccgctacaaaatgaggttcgtttatgcccattttcccatcaacgcaagcatcggcaacgacaacaagtctattgagatcagaaatttccttggcgaaaag

SEQ ID NO: 664 - DNA, 423 bp, Glycine max
  Clone ID: 6HA-01-Q1-B1-B3
ctcttcttctcaggattcttcatctgaccttgaattttctctctccctatgcccccgctaattcctccttcacttctcttcccattaccgctcccagtcaggttgttggatggcctccccttggagcatatagaatgaacagctataatagccatgcaaaatcatcagccacagaagtattcaattctacacttgacaaaagagcaagcaatagtgctggggttaggaagagtgcagatggtggcagtgatagtagcaacattatttccaaagaaaaaggaaacctcaggacttccctgtttgtgaaagtaaaaatggacgggataccaatcggaaggaacgttgatttgggtgctcacgattcttatgaaaccttagctcaaaccttggaagatatgtttgatgaatcaactacagtcctca

SEQ ID NO: 665 - DNA, 394 bp, Glycine max
  Clone ID: 6HA-01-Q1-B1-B4
gggtttaggatgtgctgaactcgtgagctacaatcacaattttaacaacattgatgtgtacggctcagaaatttggaatacactattaaaattttgttttcctatttgtcctctcagatgatctatgttgcttgcttcacatgtggcatattcttctacataaatcaatcttagtttttcttatcatgtctccaattttgttatggtattgatagttacctttatgtttgaaaaaatagaagggatgttttggtaaaaaaattataataaaagtatttttgttaattttttagttaaaaataagggttttgggtttaagtgtatcatatttataaataggaaggattttgtgtatatcttataaatagaagggattttgtgtaagataagaatt

SEQ ID NO: 666 - DNA, 330 bp, Glycine max
  Clone ID: 6HA-01-Q1-B1-B5
gcagcagccacacttcttcgccgtttcagctgaagagccatccgcaggtaagcaatggttaagcataataatgttatccccaatgggcacttccggaaacactggcaaaactatgtgaagacttggtttaatcaaccagcccgaaagaccagaagacggttggctcggcagaagaaggctgtcaagattttccccaggcctactgctggatctctcaggcctattgttcatggccagactctgaaatacaacatgaaagtcagagccgggagaggattttcactggaagaattgaaagctgcaggaattcccaagaaacttgctccaact

SEQ ID NO: 667 - DNA, 362 bp, Glycine max
  Clone ID: 6HA-01-Q1-B1-B6
gttcacacctaccctccccatgttcccaccccagtttaccactctcctccaccaccaccatacgagaagccttacaagtacaagtctcctcctcccccagtccactctccacctccaccacactacgactacacatcaacccctccaccttaccactacgaggtagcactttctcttcgcacccccacatggatgcatacagaaagtgtgataatgaaagtcatggagtgggaagatgcatctgcagcttgcagatccacacagaagtataaatgtttgattattatttagagggctcgatctaggtaaaattaaatagttattgtgcttttgttttattagacagttgtaaggcactgtgt

SEQ ID NO: 668 - DNA, 377 bp, Glycine max
  Clone ID: 6HA-01-Q1-B1-B7
cagagaggttgaaccgcggagacaaagtttgatcaatagacaatatgtttcattcaagggaaggagaagaataaatttttttcatgaacagaagatgaggagatgaaaaaacgtgaaaaatggagtctgggtgagatacgttagttagggaattgtgatgggttaaaggaaagttaatagggatttacttttttgggataaataaaatactttaaatgacattaattgtgatattggttaatttttaaaaagatgatattgattgattaatttttagggaagagagagattctaaattattttattttgattagttaaaatttggtaaaaagttgtaataaaaaaatttaaggggccaaaaaaattttttttttggg

SEQ ID NO: 669 - DNA, 373 bp, Glycine max
  Clone ID: 6HA-01-Q1-B1-B8
cttggagagtgggaagatcgcatgcagagaggactttttcgctatgatgttaccgcctgtgaaaccaaggtgattcctggtgaatatggtttcgttgcccagcttaatgagggtcgtcacctcaagaagagaccaactgagttccgagttgacaatgtccttcaaccctttgatgaaaacaaattcaactttaccaaagttgggcaagaataggtcctcttccaatttgaagctagcgaagatggacaagtccagttctttccaaatgctccagttgatgttgacaattctcccagctttgttgccatcaatgtcagtcctattgagtatgggcatgttttgctgattccgcgcattttcgagtgtttgcctc

SEQ ID NO: 670 - DNA, 382 bp, Glycine max
  unsure (1)..(382): unsure at all n locations
  Clone ID: 6HA-01-Q1-B1-B9
agataaaggtcgatataagcagataaagcgcactgaaggggtttccagcactgatattgttggtcgcatgcttctctgtgtaagagaaaggtctattgctgaaaaaaatcataatcattcttctttacaaagacagttcagcaatggccatagtccaaagtttgaagctggtgtgtctgctgcaactgcaagtggaactcgtatatctcattttctgcctacatctcgtagaattgttcagttctcaaatgggaggggtccaggacctgattctcacattgtatatatagatggtgcatttgatctctttcatgctggacatgtcgagatcttgaggcttgctanggatcttggagattttctacttgttgggatacacaca

SEQ ID NO: 671 - DNA, 336 bp, Glycine max
  Clone ID: 6HA-01-Q1-B1-C1
ctggctcctctgcgtgctcgttgaatccatcctaagtgacttgcttgctgaaggcgacacgaggtcggtagaaactaagaatgggggaagagaatgaagaaacaaaaacatttaaggatttgggcttatccgagtcattggtggaagcttgcgaaaaattgggttggaaaaatccattaaagatacagacagaagcaattcctcttgcattggaaggaaaagatgtgataggacttgcccaaactggttccggtaagactggagcttttgctcttcccatattgcatgccttattagaagcaccacgcccaaaagaattctttgcttgtgtgttgt

SEQ ID NO: 672 - DNA, 340 bp, Glycine max
  Clone ID: 6HA-01-Q1-B1-C10
cacaaaccctcccctcacactctccaaaccctagcggcactacacacgttatctctctctctctctctctctctccctctctccttcacgaagatgtcgagcgccgatcccgagcaccgagaagaggaggaggcacccgccgtcggcgacgacgaggacaccggagcacacgtcgctcccatcgtcaagctcgaggaggttgctgtcaccaccggcgaggaggacgaagatgcaatcctagatctcaaatcgaagctttaccggttcgacaaggatgggaaccagtggaaggagcgaggcgcgggcaccgtgaagttcctgaagcataaggctacgggca

SEQ ID NO: 673 - DNA, 372 bp, Glycine max
  unsure (1)..(372): unsure at all n locations
  Clone ID: 6HA-01-Q1-B1-C11
ggcggaagcaganaccaaacacaactcaatcacgaaaatgtccgaatttggcccaatcgctgtcgatgggcgcggccttcggcggcggtggcgctccaacgccgtcttccaattggcggccncggancaaaagggctccggcactggcaaggatcggaagatggcgtccgcggagcagctcgtgctcgaactcagcaaccctgaactccgtgaaaacgcgcttctcgaactctccaagaagagggagctatttcaagatcttgctccgttgctatggaattcttttggtactattgctgcacttttgcaggaaatagtttcaatataccctgttctttcaccaccaaatcttactcctgcaaaatcgaaccg

SEQ ID NO: 674 - DNA, 350 bp, Glycine max
  Clone ID: 6HA-01-Q1-B1-C12
gagaagtcaccttttcatacagtgcatagtgagatatctcacgaccataagaaatgcattggtggcttttctcctattatcaatcaaaagagttcaaaaggaccaaagggccgcaaggtttctgatttagtcaataccattgatgtgcttcctaattctgagactgaaatacaggctacttccactgctggtaataaacctgaaaatctggaggataataacatcaaggagggctctattgtagaggttttcaaagatggagaaggatttacagcagcatggtacacagccagcatattaaatttgaaggatggtaaagcttatgtatgctatgttgtgcttcttgatga

SEQ ID NO: 675 - DNA, 401 bp, Glycine max
  Clone ID: 6HA-01-Q1-B1-C2
ctgcaactgcaacttcaaacttctacttcaacttcaaccactgcaagctctgaaagaagaagaaaaaaaaaatatccccatttggtttggttggtgaaagttgcaaccttttttcacgggctcaagctgaagtaactttttaacttggcagtctctttttttcagcatcgaccatcgttttgttttgcaaagatctgatctgggtcgtggatatttcaatgtgaaagttaaggttttttttgttggggtgttggtgtttttgttgcataatagtataatagaaagaaaaaaaaggtgggatttttaaaaggggtggtggatatggatcgttctgctatgactgttgggccaggaatggatatgccgattatgcatgacagtgacaagtatgagctggtccg

SEQ ID NO: 676 - DNA, 416 bp, Glycine max
  Clone ID: 6HA-01-Q1-B1-C3
ctttcgccattactttcttgtattgccctgcttactattggccctattaatcaatgagaaattcacattgaaggaggtcatgtggacattttccctgtatttggaatctgttgctatacttcctcaactagtacttttacagataactaggaatattgacaatttgactggacagtatgtctttctcctcggtgcatacagaggactatacattctcaactggatctatcgctactttactgagccccactttgtccattggataacatggatttctggccttgttcaaacactactctatgctgatttcttctatgacgatttccaaagctggaagaacaacaaaaagcttcagttgccagcatgagtttactcatctgttcttgaaaacaagggtctaagtggacaattaacag

SEQ ID NO: 677 - DNA, 413 bp, Glycine max
  Clone ID: 6HA-01-Q1-B1-C4
cagagaagcgaagaggcgcagccgtagcagtaactcgtggaattgctagcaatggcgaggatcaaggtttacgagctgaggcagaagacgaaggctgatctgttgaatcagctgaaggacctcaaggccgagcttgccttgcttcgtgttgctaaggtcaccggcggtgcacctaacaagctctctaagatcaaggtggtgaggttgaacattgcccaggttttgacggtgatttctcagaagcagaaggccgcgttgagggatgcctacaagaacaagaagtacttgcctctcgatctccgccctaagaagaccagggccattcgcaggaggcttactaagcaccaagcatcattgaagacagagaaggagaagaagaaagagttatatttcccactgaggaaatatgctat

SEQ ID NO: 678 - DNA, 360 bp, Glycine max
  Clone ID: 6HA-01-Q1-B1-C5
gagatggcttctcctcttcttactccttacaagatgggcaaattcaatctgtcccatagagttgttttggcaccgctgaccagacagaggtcttacgacaacgtcccacaaccccatgccatcctctactactcccagagaacttccaacggaggccttctcattactgaagccactggcgtctctgacacggctcaaggctatccgcaaacccctggcatatggactaaagaccatgttcaagcttggaaacccattgtcgatgccgtccacgccaaaggcggtgttttcttctgtcagatttggcacgttggaagagtttcagattcagtttatcagccaaattggacaagcaccata

SEQ ID NO: 679 - DNA, 409 bp, Glycine max
  Clone ID: 6HA-01-Q1-B1-C6
gaattttgcaagtgtgagaaacatggcatctcgtcaaaacaacaagcaagagcttgatgaaagagcaaggcaaggagagactgttgtcccgggtggaactggtggcaagagcctggaggctcagcaacaccttgctgaaggaaggagcaagggagggcaaacaaggaaggaacagctgggtacagaagggtaccaggaaatgggacgcaaaggacggttgagcactgtggacaaatcaggagaagaacgtgctcaagaggaaggcattggcatcgatgagtccaagttcaggactggtaataacaagaaccagaatcagaacgaagaccaggataagtgataatgtaacacccttcactagcatgtgtagtgtgttcttatgctagcttaaatgtgagtgtcaagtgtt

SEQ ID NO: 680 - DNA, 327 bp, Glycine max
  Clone ID: 6HA-01-Q1-B1-C7
ggctcgggctctgatgcttaagggtgtcgaagagctcgctgatgccgttaaagtaacaatgggccctaaggggcgtaatgtggttattgagcaaagttttggagcacctaaagtgacgaaagatggagtaaccgttgctaagagcattgaattcaaggacaaagtcaagaatatcggtgccagtcttgtaaagcaggttgctaatgctactaatgacgtggctggtgatggaaccacttgtgctacaattcttactaaagcaatatttacggaaggatgtaaatcagttgcagctggaatgaatgcgatggacctgagacgaagtat

SEQ ID NO: 681 - DNA, 91 bp, Glycine max
  Clone ID: 6HA-01-Q1-B1-C8
ggacaattttgccattgtgtgtgcagtctccatgttaactcccacagctgcacttactatgggagttaaggggcatactgcagagactggg

SEQ ID NO: 682 - DNA, 353 bp, Glycine max
  Clone ID: 6HA-01-Q1-B1-C9
gtaatctcagtgggtctagttgtggcaataggcctcacatgtcgaaggatgttagatggaaagccataagacatgctcaaatgcagcatggagtcttgggcttgagacacttcaatcttttgaagaagctaggttgtggagacattgggactgtatatcttgctgaactaattggcaaaaattgtttgtttgctattaaggtgatggacaatgaatttttggcaagaaggaagaagacgcctagggctcaaacagaaagagaaatattgaggatgctggatcatccttttcttccaacactgtatgctcagtttacatcagataatttgtcatgtctggtcatggagtattgt

SEQ ID NO: 683 - DNA, 354 bp, Glycine max
  unsure (1)..(354): unsure at all n locations
  Clone ID: 6HA-01-Q1-B1-D1
gtgagaaacanagaaaggaaataattgatctttgaaaatgcanggaggaaagaaagctggagagtccatcaaggaaacagctgcaaacattggtgcttctgccaaagctggcatggagaaaaccaaggccactgtccaggagaaggcagaaagaatgacggcacgtgatccgatgcanaaggagttggcaacccagaagaaagaggcaaagatgagccaggcagagctggacaagcaggcggcgcgtcagcataacacggcggcgaagcaagctgccacggcagggcacatgggacaacccatggggacccatcagacgtcagctatgcccggtcatggaaccggacagcccac

SEQ ID NO: 684 - DNA, 361 bp, Glycine max
  Clone ID: 6HA-01-Q1-B1-D10
ctcgagccgctctttttcttctctctcaacaacttcaccttcttcctcctcgatcatgtctcacttcaagggcaagtaccatgatgagcttatcgccaatgctgcgtacattggcactcctggaaagggtattcttgctgctgatgagtcaacagggacaattggcaagcgtttggccagcatcagtgtatagaacattgaatccaacaggcgagctcttagggagctgcttttcactgctcctggtgttcttcaatatctcagtggtgtcatcctctttgaggaaaccctctaccagagcacagctgcaggcaagccctttgtgaatgtcttgaaggaagctggtgtgcttcctggcatc

SEQ ID NO: 685 - DNA, 355 bp, Glycine max
  unsure (1)..(355): unsure at all n locations
  Clone ID: 6HA-01-Q1-B1-D11
gacatcgtgtgtcagagtctgaaacctganacctgaaacgctgaagctgagttggagtcacagttgttgttggtagccatggatgcagtagctacggcgaaaccgcttctgtcactgtcgtttttgcttttgctaccgtcttttcttccgatcgccgtcgcttacagacccggcgacatcgttcccatgagccgcatgggtcaataccactcctcgcgaaccgtgtggcaggacctcattggccgtcactgccccatcttcgcagtgaatcgcgaggtgttgatgcccatacccaagcccacgggttacactggtgcggatgcttataaaatatcgtttcaagttggcanggaaa

SEQ ID NO: 686 - DNA, 351 bp, Glycine max
  Clone ID: 6HA-01-Q1-B1-D12
ctttgaacaatcagccttacagacgtcaaaatgacaaagaatttggagatatcttaaagaagactctaagggaaggtggcaatgtattattacctgttgacactgttggacgagtgttggagcttattctgatgttggaatcgtattgggctgatgaaaacttgaactatcctatatactttcttacatatgttgcatccagcacaattgattatgtgaagagtttccttgagtggatgagtgataccatagcaaagtctttcgaaaaaactcgtgaaaatatatttcttttgaagtatgtcacccttcttattaacaagactgagcttgacaatgctccagatggtccaa

SEQ ID NO: 687 - DNA, 407 bp, Glycine max
  unsure (1)..(407): unsure at all n locations
  Clone ID: 6HA-01-Q1-B1-D2
gcctgcaaccttgcagaacaggcttttgatgaagctattgctgaattggatacacggggagaagagtcatacaaggatagcactctgatcatgcaactccttcgtgataacctcaccctttggacctctgacatgcaggatgatggagcagatgaaattaaagaagcagcaccgaaacaggatgaccagtaaaaatattttactgctaattagaattgaacttctcctccatatctttttgaagggagaaggtgtttgttgctaatatctctttggtactgagattttaggcattcatgtntgttatgattgtggatgtactgggccgtntttagtttgtcctttcattttcaagtgttttccaaattgcctattttattaaagacgctgaagtttttaatatatgg

SEQ ID NO: 688 - DNA, 419 bp, Glycine max
  unsure (1)..(419): unsure at all n locations
  Clone ID: 6HA-01-Q1-B1-D3
gtgtttgattttggcatcactggcctctgcagcactctgtgccaaccctcgtagaccagtggatgtacaatttggccgaaactacgtgcccacatgggcctttgatcacatcaaatacttcaatggaggttctgacattcagcttcatcttgacaagtacactggtactggcttccagtccaaagggtcatacttgtttggtcacttcagcatgtacataaagatggttcctggagattcagctggcacagtcactgctttctatttatcttcccaaaatgcggagcacgacgagatagactttgagttcttggggaacagaacacgacaaccttacattttgcaaacaaatgttttcacatgangcaaaggtgacagagagcaaagaatctatctctggtttgattccacaaaagaat

SEQ ID NO: 689 - DNA, 412 bp, Glycine max
  Clone ID: 6HA-01-Q1-B1-D4
gatgggttgtggcggtgcaatctcagtgtcactgctgctgctgcttctctcttgttttacagaaatagccttggctggctgcgataaggctccagtgctgttcgtcttcggcgattccaactcggacacgggtggactcgcctccggactcggtttccctataaatcctcgcaatggccgcaatttctttcacagatccactggccgcttgtccgatggtcgcctcctcatcgacctactctgcctgagtttgaatgcaagtttgttggtaacatacttggacgccttgtctggaaactcattcacaaatggagcaaactttgcagtggtggggtcctctactctcccaaaatatgttcctttctccctcaatatacaagtcatgcaattccggcgtttcaaagctcgctcc

SEQ ID NO: 690 - DNA, 414 bp, Glycine max
  Clone ID: 6HA-01-Q1-B1-D5
ctttgcttttggttttggttgattcaaggccttcacagcattcgttgcggcattttaatcgatttatccaagcaggactgaatgaactagtggagtctaaaggtgggaaaaagaagtctagtagtagtagtagtaaatcattgttctacgaagctcccctcggatacagcattgaagacgttagaccaaacggtggaatcaagaaattcagatctgctgcttactccaactgcgctcgcaaaccttcctgatatccatccagattgatagttcattgcatgcaaccatagttttattaggttttttcttctttgttttcaattaggtttttgctgctctccttcaaactccgtctttccgaatcctctctttgtgattgtgttctgttctgcttcctaccgcgatagtttctct

SEQ ID NO: 691 - DNA, 357 bp, Glycine max
  Clone ID: 6HA-01-Q1-B1-D6
ctcaattactacatcgtattctgcaaattcaaactgggtcttggttttctgaaagatgggaggtggcaaggacaagcaccatgatgaatctgacaaaggaattttttcacagcttgctcatggggtagctggtgcagcacatggtggacatgggtacccacctggggcttacccaccaccacctggggcataccctccgcaccaagggtaccctccacaacatgggtatcctccggctgggtaccctccacatcaaggttaccctcctgctggttacccaccagctggttatcctggttcatctcatgcaccaggttctcatgggcacgggggcatgggaacaatgctcaccggggg

SEQ ID NO: 692 - DNA, 336 bp, Glycine max
  Clone ID: 6HA-01-Q1-B1-D7
caagagctgataagaaaatgcagttatatcatcatcccttggatttggaaagccagagggtgagacttgcattggaggaggagggtgtagattatacatctcaccatgtcaatcccattactgccaagaacttggattccactttcttcaagatgaatcgccatggaagagtcccggttttccaaaatggctctcacatcatttacaatactattgatataatccagtacatagaaagaattgctgtggtttcctcaggggctgagagtatcagcgccagtagcacggaagtgattgaatggatgcagaagatacaagactgggaacccaaaattt

SEQ ID NO: 693 - DNA, 358 bp, Glycine max
  Clone ID: 6HA-01-Q1-B1-D8
gtgagagagagagtactagtgtgataaatcaagagagagagagagaatatggtttccagggttcacaagagaacagccatgtacaggaacctacacctgcttcgttcaatcagatactcacactcggtgtcagattacatacaaggtttaaagcaaaaactggaagaattgaaccagttaacagtggcaacggcacgaaaaatcgttgactatgatccaatgcctaagcttgaagttgaaacacaagaagagggttttgtgatcaaggtgctgagtgaaagcagttgccaagggttgctggtgtttatattggaagcctttgaagagctggggcttgatgtgctccaagctaaggttt

SEQ ID NO: 694 - DNA, 357 bp, Glycine max
  Clone ID: 6HA-01-Q1-B1-D9
gtttcagtttcggatccctttcttctctcacaccaatttccaggatttgaaacatggcagattcaaaatcaggattgaggaaaccagtgttcaacaaggttgatcagcttcgcccggggacaagtgggcacactttaactgtgaaggtagtcaatgctaagatggtgatgcacagaggtcgttctgatggtcctcaatcccggcaaatgcaaattgctgagtgcttggttggtgatgagactggaatgatcatattcactgccagaaatgatcaagtggatacgatgacagagggtgctactgtgatcctgcgtaatgccaaaattgacatgttcaaatgatcaatgacgcttgctg

SEQ ID NO: 695 - DNA, 351 bp, Glycine max
  Clone ID: 6HA-01-Q1-B1-E1
ccgcgcgagccaacttaaccagtgaaccccaacgcaccgaaacaaaaacctccgcaaacctaagcctaatctcaatggaacatggacggcgacgacgagacctcgggtccgatgatcgacgaaatctacgccaacggcggtggcgtcggcgacgacggagacaagcggagccgccgcgcaatcatgagcggcgaccagctcgacatcgaggcgtacgcggcgctatactcggggcgcacgaagatcatgaggctcctcttcttcgccgacaagatgaacaacgcggcgacgcagctcgaagcgctgcgcatggcctacgacgagattaagaaaggagagaacacgcagctg

SEQ ID NO: 696 - DNA, 383 bp, Glycine max
  Clone ID: 6HA-01-Q1-B1-E10
cgcttaaaccctttgctctgcgccttgagtctatctctctgttcaccaatggccatgtacgcaatgcttcgccgcgcctcctccgccgcgctgcctcagttggcgcgccgccccgccatggcttcctcgtcttctagaaccttccacagtgttctctctgttctccgcagagagacagcgactactactactatcgcaccctctcttcgcttcgccaacgccttcgctaccaagtccagcgcggacgaacatctagctcaagtgcttcagtctgagatccaatgcgccctcgaagacgatcatgcccagcaccaagtcgaagttcctgttgattttccttttgacattgaggacaatcctggagaaagaaccatacaactaaa

SEQ ID NO: 697 - DNA, 373 bp, Glycine max
  Clone ID: 6HA-01-Q1-B1-E11
caagagtccctgtcatagttacactgactaaggttgggaggcactatattgtagatgcaacatcagaagaggaatcacaaatgagctctgctgtttctatttctgttaataggcaagggcacatctgcggcataaccaaacgtggaggtgtagggctggatccaagcatcattcttgatatgatatctgtggctaagcatgtaagcgagcaattaataaacaaattggattcagaaatagcttctgctgaagctgaagaggagtcatgacagagaagcacttagtgataactagggtgtaccgaatacttcaattattttggacaaaattttgtaactgaatagagggattaaagatattaaatgtatgtttc

SEQ ID NO: 698 - DNA, 368 bp, Glycine max
  Clone ID: 6HA-01-Q1-B1-E12
caacgggatgattagtttataagcatcacacagacacttggaagactaggttctaagttctaattcgatgagactcgaatcttcagcgcgagagcaagagagagaatagaaatctatatcagcttcttgacgatgaatgcagaatccaatttctaaactcccgatgaattgtcctattcaaatgataacttcactttgaaggctcaagcatttcctagcaacatcagtgtcttttcccttgaatatgtagcaagtttgtctttatggagacatttgatttgactttgaaggttagccttgctgtgaaattttgaccttcttgactatttccttcttaagagttgacgtaattaagaggagcttacaat

SEQ ID NO: 699 - DNA, 409 bp, Glycine max
  Clone ID: 6HA-01-Q1-B1-E2
ctcagattcaccttcatctgcgtctacagagaagactaccactgctgcacctcctcctccttctcgagccaacgaccctgcaaaaccacctgcaaaggcacaagtggtgggttggccaccagttaggtcatttagaaagaacatagttcaaaggaacaagaatgaagaggaagcagctttcgtgaaggtgagcatggatggtgcaccgtatctacgaaaggtggacataaagttgtacaagagctaccaggagctgtcagatgcgctggctaagatgttcagttccttcacgattgaaaaatgtgggtcccaagggatgaaggactttatgaatgagaccaaattgatagaccttttgaacggctctgattatgtacccacttatcaagacaaggacggagactggatg

SEQ ID NO: 700 - DNA, 424 bp, Glycine max
  unsure (1)..(424): unsure at all n locations
  Clone ID: 6HA-01-Q1-B1-E3
agtgtgaaacagatgatttgctgctgtaacanaatggatgctactacacccaagtattccaaggccaggtatgatgaaattgtgaaggaagtctcttcctacttgaagaaagtaggatacaaccctgacaagattccttttgttcctatctctggttttgagggagacaacatgattgagaggtccacaaaccttgactggtacaagggtccaactctgcttgatgcacttgaccagattagtgagcccaagaggccctctgacaagcccctcaagcttccccttcaggatgtgtacaagattggaggtattggaactgtgccaatgggacgtgttgagaccggtgtcttgaagcctggaatggtggtgacttttgcaccaactggactgacaactgaagtcaagtctgtggagatgcaccatg

SEQ ID NO: 701 - DNA, 421 bp, Glycine max
  Clone ID: 6HA-01-Q1-B1-E4
ctgttatctgctaataaggacactttacatcccaattacagaattccttttcagattggtaaatcatctatggaaaaagacttacttgagttagaagcaaataagggtcagagacatgactatatgggcacaatgagcaatttggttcctgggatgtcagacatgtcagagcaagtggaaagcatcatgaattccatggaactgcccacaattgcccatagtagacatagctcactgagcagtgcaggtggtgatggtggttcatttggtcgtgagatgggtttgaataattcacgtggagatgaggtttctggtgacaggatacctccttcaacaaaagggtttgataatgctttccataagcgcccccatgtaacgcgggttttatcctcacctgatgttcagtctagacagccatccg

SEQ ID NO: 702 - DNA, 407 bp, Glycine max
  Clone ID: 6HA-01-Q1-B1-E5
cccctcgccgccgcaaccccggcccccgcctcccccctcgcatctgaagacatccgcaagatcctgcaaccgttctcccaggaacagctcctcgacctactccagtcggcgtcgctccgccagcccgacgtcctcgacgccgtgcgcgccgtcgcggactgcgactcgaccctccggaagctcttcgttcgcggactcgccggcgagaccacgacggagacgctccgcagcgtgttctcggggttcggcgaattggacgaggctatcgtgatcatggacaaggccaccggaaggtccaagggctacggcttcgtcgtgttccgccatgtggacggcgcaattctcgccctcaaggaccccagcaagaagatcgacggccgcatgacagtcacgcagctcgccgccgc

SEQ ID NO: 703 - DNA, 270 bp, Glycine max
  Clone ID: 6HA-01-Q1-B1-E6
aaaagaactgagctatcagatgggctaattttagagaagacatcatctcctttgggagtgctccttattgtttttgagtcacgccctgatgctcttgtacagatagcttcactggcaatccgaagtgggaatggacttctcttgaaaggtggcaaagaagctaggcggtcaaatgcaattttgcacaaagtaattactgaggccataccagatactgttggtggaaaacttataggacttgtgacctcaagggaaaaaatccctgagcta

SEQ ID NO: 704 - DNA, 424 bp, Glycine max
  Clone ID: 6HA-01-Q1-B1-E7
gagctgcgaaaacccccaactccaacctctgttcatcgtctaccgcgctttcttttcaaccagaactatgattaagctttttaaagtaaaggaaaagcagagagaacttgcagaaaatgcaagtggcggaccacctgttaagaagcaaagtgctggagagttgcgtcttcacaaagatataagtgagctgaatctaccaaaatcatgtaccatgcaattccccaatggcaaagatgatctgatgaactttgaagtttcaattcgacctgatgatggatattacttaggtggcacatttttgttttcctttcaagtgtctcccatctatccacacgaagcaccaaaggttaagtgtaagacaaaggtctatcatccaaatattgacttggaaggaaatgtttgtctcaacatcttacgagaagat

SEQ ID NO: 705 - DNA, 334 bp, Glycine max
  Clone ID: 6HA-01-Q1-B1-E8
aaactactgatctacctctccatcacccttctctacacaggaaatagtatcttcgtttcatcaatatgtttggttcatccggcatggcacaggaatctggtatgttcatggttaaccaaacaattggcagtgttttgtgctgcaaatgtggaattccaatgcaaccaaatgctgctaatatgtgtgtgaagtgtctgcgctcggaagtcgatattacagaaggactgctgaagcgtctagtgctggttcattgccctgagtgtgatagttacttgcaaccaccaagaagttgggtcaagctgcaactggaatcgaatgaactgttgacattttg

SEQ ID NO: 706 - DNA, 362 bp, Glycine max
  Clone ID: 6HA-01-Q1-B1-E9
atctatatggtctttgaatacatggaccatgatttaacaggtcttgctgaccgacctgggatgagatttacagttccccaaattaagtgttacatgagacagcttttgactgggcttcactattgtcatgtaaatcaagtacttcatcgtgatatcaaaggctcaaatcttcttatagacaatgaaggaaatcttaagcttgcagattttggactggcacgatcattttctaatgaccaaaatgcaaatcttactaatcgtgtcattacgttatggtacagaccacctgagttgctgctaggaacaacaaagtatgggccagctgtggatatgtggtctgttgggtgcatttttgctgagct

SEQ ID NO: 707 - DNA, 424 bp, Glycine max
  Clone ID: 6HA-01-Q1-B1-F1
ccaaaaaaaatgtccgggaacaaaacctgccggcccgggtttggagaattaagaacgtgcttacaataatatgggtcctgttcaacaactaacaaaactagaagaaggtaatgaataccgtacacttcctactggggaacaaagtacaaaagaaccgcgggctcctaatcccaacaagttgactcaacgtttaaaaaggagcaaaaacaaccttgaaggttgggaaggctcttttgggttttagagcacttgtgctgcctcctgtggaaatgttaaacctggctcaaattcgcctctctttgcagaaaaagtgggcgcattagtcaagcaaaatctacattagttaaacttctacagtatgaccctgaaaagtctcctgaaaatgttcgataccatggccctcctcaagtaatgctagcatact

SEQ ID NO: 708 - DNA, 372 bp, Glycine max
  unsure (1)..(372): unsure at all n locations
  Clone ID: 6HA-01-Q1-B1-F10
cggaggaagaagaaagcggagtatcgatacaactggaattccccgaaggtcgggtgaagaagattatggcgctggacaaagacgtgaagagggtgagctcagaagcgttgtttctggtgtcgcgctccacggaattattcctccaattcctggctgaaaaatcggcgcaggttgcgattgaaaagaaacggaagaccgtgaatctggaacatataagagaggccgtgaagaggcaccagccaacccgggattttctcctcgacgagcttccgccgccatctcagcccaccaagcccgataggcccactcagcctgccggtcggcccaaattggatcctcctncccgtggtactcgccgcatcgatctaattt

SEQ ID NO: 709 - DNA, 367 bp, Glycine max
  unsure (1)..(367): unsure at all n locations
  Clone ID: 6HA-01-Q1-B1-F11
aggaaaacaanacanaaataaaagtgaagccggtgcgcgctgcctgataccatgtgcatgcccatacgtgatcacacatgcagcttttcaaacagtaataacggacacagttgccagatgcattccagcaacccaaagaagagaaagcgtccttgcgacgacgactgctacaccaagcccgccgcatcacacggtttcatatccgtgatagggaggcgacgcgcgatggaggacgcggtcaaggtggttccaggtttggtggcggcggaacaacgctgtggcagttacgatttcttcgctgtttacgacggccacggagggaccttggtggcaaacgcttgccgcgacaggctgcacttgttgctgg

SEQ ID NO: 710 - DNA, 337 bp, Glycine max
  Clone ID: 6HA-01-Q1-B1-F12
gtcaagccggtgccaaatgcactagcaggcagtttgtatggctgtaggtgccacactgtggctagtcacacgctgttctagatgattcaatgtttcaccaggagtcacctatagtagtgttcaggtctgtcatctaataactactgtaaacaggtgatccatctaaatgctaatcaattcacatatagttatccatagttttatagacatctagatatatatttatgcaatatttctcagaatcttcaatcgaatcaatttcatgatgtgacttaagatggtttccacccgtcacacataatcagttttgtacgagattcctcaatcagtttcaaca

SEQ ID NO: 711 - DNA, 399 bp, Glycine max
  Clone ID: 6HA-01-Q1-B1-F2
aaaaaaaaaaaaaaatgagaatgagaagttcctggtttataaacgcatgacaaatggggacttgtctaattgcttgtactacaaaaacacatctgaagatggtactttgcaatcattagactggataactaggttaaaaattgctactggagcagcagaggcactatcatatctacatcatgaatgtgttccgccgattgttcacagagatattcaagcaagcagtatacttctagacgataaatatgaagttcggttagggagcctaagtgaatcctgtgctcaagaaggtgatattcatcaaagtaaaatcacccggtttctgcggttgcctcagtcttctgaacaaggcacatctggttcatcaacatcaatttgtgtccaagacgtttaatgttt

SEQ ID NO: 712 - DNA, 414 bp, Glycine max
  Clone ID: 6HA-01-Q1-B1-F3
ccgtttcgtcctcaacatgccgcaaggggaatacataaaacgtcacaaaagaaaacaaggctaacgtcctgattacttcgagcggaaacccaagaaaaaagcgcgtcaagttcacaaacgttcttcaattgcccagaaagctctgggtattaagggcaaaatgattgccaagaaaaattatgctgaaaaggcacagatgaagaagactttggctatgcatgaagaatcaacgtctaggcgcaagactgatgataatgttcaggatggagctgttcctgcttatctccttgatcgtgataacacaaccagagcaaaggttcttaacaacacaattaagcaaaagaagaaggagaaggcgggaaaatgggatgttcctctacctaaggtacgtccggtggctgaagatgaaatgtt

SEQ ID NO: 713 - DNA, 417 bp, Glycine max
  Clone ID: 6HA-01-Q1-B1-F4
gagagctgatgatgactcgtggagccatattatagaggctcttctagttggcagtggaacgtcgactggtactgttgattggcttcttgaagagcttctaaaggataagcttcaacagtggctttcttgcagatctcaggaaaaagatgaagagacaggctgctctttgtccaagaaagagcaagggattattcacatggttgctgggttaggttttgagtgggccttgaaccctattctcacttgtggagtcaatataaatttccgtgacatcaatgggtggactgcccttcattgggctgcacgttttggaagggaaaaaatggttgcttcacttatagcttctggagcatctgctggagctgtgacagatccaaatgcacaagattcaaccggtaaaactgctgcatctattgc

SEQ ID NO: 714 - DNA, 419 bp, Glycine max
  Clone ID: 6HA-01-Q1-B1-F5
atggatattgttaggttgatcgaatcacaggagacagataggggtgaccgtcctacaaagaaggtgaccatcagtgactgtggtgagcttccaaatgcttgaggtggttcttgtgtaattttgttggttattccttctattaacttgttgagttgagaagggaaagaggggcggggaagaagaaactttggctttcttaaattttagtctgactattcttaaaatatgttctgtaacaccttattttcacactgaacctacaaacttttagcagccacatgtattctggtagaactatagtttgagttgtcgtcgggttggacaatttaataccccatttgaatggtatcttcttaagccaaagtgcagtttccatggggaattggatggctagagaattattggagtcttctacaaga

SEQ ID NO: 715 - DNA, 418 bp, Glycine max
  Clone ID: 6HA-01-Q1-B1-F6
tctctctccgagcttcactctcttttcgcctctgctaaagggagaaaaatggggttctcctcctttctgggtcgtgttctctttgcctccctcttcatcctctccgcatggcagatgtttaatgaatttgatgccaatggtggacccatctcgaaagagttgattcccaaactcagtgtggtgaagaataatttatcctctaaattgggggtagcgctaccagatattgatgcccggcaattcattgctaccatcatatttcttaagggggttggagggattttgtttgtgtttggaagcacatttggatctttcctactgcttttgcatctggcgattactactccacttctgtacgatttctataaccatagccccggcaagcctaagtacaatcagctgctgaatgatttcttgc

SEQ ID NO: 716 - DNA, 426 bp, Glycine max
  Clone ID: 6HA-01-Q1-B1-F7
aatagagatcaagcgcagacatgggaacttaacaaaggaagaaacgcgaattgatgatggaggtcaccaaagacgaagctgcaaccccaggagcaggaggtgctcaacctcgcaatccaaatccaaatccaaatccaactccaaatccaaaccctaaccctaaccctcctcacaccaccagaggatctaaaggaaaatcgtgtaagggatgcacctactactcatcgcttcataaagccaagtccaaaaaccccacatgcgttggtttctccagaacactccagcaagtacccccctttgttgtcggagaatctgagttggaagcttccaaagagggccgcagccttaccaatttcaagtatgcatgtgttggatactctgtctacttagacaacaaagattcttcagctgactcgcaggataaaa

SEQ ID NO: 717 - DNA, 411 bp, Glycine max
  Clone ID: 6HA-01-Q1-B1-F8
agaggaagttacgggaaatgatattgctgaaattgtaagcaagtggactggtatccctgtttcaaaacttcaacaatcagagagggagaagttgttgcatttagaggaagtgcttcataagcgtgttgtaggccaagaccctgctgttaaggcaattgctgaggctatccaacgttcaagagcaggtctttcggatcctcatcgtccaattgccagcttcatgtttatgggacctacaggtgtaggaaagacagagctggctaaggcacttgcagcctacttgttcaacactgaagaagctcttgtacggattgatatgagcgagtacatggaaaaacatgctgtttcaagattgattggggctccacctggatatgttgggtacgaagaatgagggcaacttactgagat

SEQ ID NO: 718 - DNA, 384 bp, Glycine max
  unsure (1)..(384): unsure at all n locations
  Clone ID: 6HA-01-Q1-B1-F9
gtgcaccctcttgcttgtgaggaacctcataagagaggttgctggttttgcaccctatgaaaagcgtataactgagttgctgaaggttgggaaggataagagggcacttaaggttgcaaagagaaagcttggaacccacaaacgtgcaaagaagaagcgtgaggaaatgtccaatgttcttaggaagatgagggctggtggggctggagacaagaagaaataagtcttatttactcttttctagtttcactagatggacctgtgtattgatggacgaactttcatatttttgctttggattaattagtttacttcaacattttgtttgagaaatgtgttttgcttaactgagacatgatttatggaagaagctanatttggatt

SEQ ID NO: 719 - DNA, 180 bp, Glycine max
  Clone ID: 6HA-01-Q1-B1-G1
ccatccacttacagttcttatagtggtgggaatgcaagttatggaacataatcagttcctccacctgcaagttatactggtggacctaattcctatcctccatcatatgggggtagcgtgggtggttatgggggagataatcaatgggatggacggagtggtggtagatctgggcctcct

SEQ ID NO: 720 - DNA, 340 bp, Glycine max
  Clone ID: 6HA-01-Q1-B1-G10
gtctcagcttagggttttaccgttaaacgattctcttcgtctttctctgttctgaaaccactaccgtttcgtcgtcaccatgccgcaaggggattacatagagcgtcacagaagagactatggctaccgtcttgatcacttcgagcggaagcgcaagaaagaggcgcgtcaagttcacaaacgttcttcaattgcccagaaggctctgggtattaagggcaaaatgattgccaagaaaaattatgctgaaaaggcacagatgaagaagactttggctatgcatgaagaatcaacgtctaggcgcaagactgatgataatgttcaagatggagctgttcct

SEQ ID NO: 721 - DNA, 363 bp, Glycine max
  Clone ID: 6HA-01-Q1-B1-G11
ctaagttacatcaaccagctttgcgataaaatgcctagcccgatgggagaatcagctgttgactgtgggaatatctcttcattacctgtagtgtcctttactattggtggaagaacttttgagcttagcccagaggagtacatactcaaggtgggtgaaggtcctgtggctcagtgtattagtggctttactgctatagatattccacctccacgtggccctctctggatccttggtgatgtcttcatggggcgttatcacacagtatttgattttggcaaacaaagagtgggatttgctgatgctgcatagagtgtacgcgtgtctcagaatatggcgatccatgctattggtttatatact

SEQ ID NO: 722 - DNA, 344 bp, Glycine max
  Clone ID: 6HA-01-Q1-B1-G12
cgatctggtagaaacgatgaaggaactatgggcacaaatggggtcactaatggccactattgtgttcatgtacacaatctttgagcgcttcttccctccacacttgcgtgaaaaacttcaagcctatactcaaaaactcaccaaccatttcaacccttacatccaaataagcttccctgagttctcaggggaacgactgaagaagagtgaagcatacacagccatccaaacctacctgagtgcaaactcatcccagagagccaaaaggctcaaagctgaagttgtgaatgatagccaaacccctcttgtcctcagcatggatgacaacgaagagataactgacg

SEQ ID NO: 723 - DNA, 419 bp, Glycine max
  Clone ID: 6HA-01-Q1-B1-G2
ctgcggtggtaactgtggttgcggaagcgcctgcaagtgcggcaacggctgcggaggctgcaagatgtacccagacttgagctacaccgagtcaaccaccaccgagaccttggtcatgggagtggcaccagttaaggctcaattcgagagtgctgaaatgggtgttcccgctgagaacgatggctgcaaatgtggagctaactgcacctgcaacccctgcacttgcaagtgaggtgttggagagctaaagcttcaagcagaaatggcccttagaaataatgataaaaactatatgtagtttcaaaacttcaaaattatgtagtatgtattatgttgcactctggtgttttgtgtctaaacaatcacccttagaataaagtggtcatttcttgcccttgagcaagttcaagtgttttgga

SEQ ID NO: 724 - DNA, 432 bp, Glycine max
  Clone ID: 6HA-01-Q1-B1-G3
tccaagaaaatggaaatgccaatgggtccgacttcaaacaagccgcaagaagaattactgaaccaactgaatcccaagacaaatttgcagaaggtagagctcttatctcaaggctgactgaagaaaagaataatgcaattcaacaaaatagcaagctctgccaggaactggagctactgaagagggaaggcaacaaaagtcgtggtggagtctcatttgtcattgtcgtattaattggcttgcttggcataattatggggtatctcatgaagacaacctaagcatttctgcgattcaatctttcaccatagttttcgatcttagtttctttgttcctgactattcaagcaattatgaggaaagttaaaatagatcaattcagcagatgttggtttttctttttatttttgctatttcttttctttgggtgga

SEQ ID NO: 725 - DNA, 291 bp, Glycine max
  Clone ID: 6HA-01-Q1-B1-G4
ctcaggtgaagcacgcacttgttgtcaaagttatgggtcgtactggatccagaggacaagtgacccaggttagagtgaagtttttggatgatcagaaccgtcacatcatgaggaatgtgaaaggacctgtgagagaaggagacattctcaccctactcgagtctgaaagggaagcaagaagattgcgctagatggtctcttttttttggcttgcctccaaattcgaacaaaagcaatatttttcttgatatttatggtagttagtcggtgctaaaggggttatagcaccct

SEQ ID NO: 726 - DNA, 381 bp, Glycine max
  Clone ID: 6HA-01-Q1-B1-G5
ctcttattcaggaatttggagagactgttgatatagaaaggtaggataaaccagtggccaaggaatatatggcgttttctatggttttcattgttagcaacattatgctgcttttcagttcagcatttgccaaaactgctagtcctccctctctgagcccaactccagcaccagccccggcacccgactacgtgaacctcaccgagttgctcagtgttgctggtccatttcacaccttccttggataccttgagtccaccaaagtgattgacactttccaaaaccaagccaacaacactgaagaaggaattaccatctttgttcctaaggacagtgccttcaatgctgtaaagaaaactgtcctatccaacctcaactctg

SEQ ID NO: 727 - DNA, 417 bp, Glycine max
  Clone ID: 6HA-01-Q1-B1-G6
gataagtatgaagaataaaaacagtcgagctaatcggaaagctcgttcggtgaaaccccccgattcctgtttatcttcttccaattcaaacaagaaatggatggttccctataaattctacgatgtcaagggtcccaattccgagtcaaaccctaatgttgactcgtctagttgggttttgtgcaccgaggttcaattggaaaccattctgttgaaaaacattgaaattatatacaatgacactgtgccaaagcttgttgctttgggctacagtgaggagattgctgtcaaagcgattctgtacaatggacattgttacggtgccaatgatttggcaacaaacgtgctgcacaactccttggcttgtttgacaacggggaccttggacttgtctgagtcaagccctgcgttccctga

SEQ ID NO: 728 - DNA, 421 bp, Glycine max
  Clone ID: 6HA-01-Q1-B1-G7
agcttctgaaaactgcagtgcgctacctaagggaaagatctgtccttttcaaatattgtgctgaagaggtagccaatatgagacacaatgcactatttagaagatttataagtgctcttacacgtggaggacctggtggattgcctcgaccaattgaagtgcatgctcatgacccactacgatatgttggtgatatgctaggctggttgcatcaggccttggcatctgaacgtgaacttgtagctgtattacttgatccagatacaattaccgattctggtccgaagcaattctccaataactctgagaatggctctgggaagacagaatctgacttgatgtttgttcttgatagaatttttgaaggagtatgtcgaccgtttaaattgagagttgaacaagttttacagtctcaaccaag

SEQ ID NO: 729 - DNA, 418 bp, Glycine max
  unsure (1)..(418): unsure at all n locations
  Clone ID: 6HA-01-Q1-B1-G8
gacataaagaaggagaagtgaagtgatgaatgccccagatcgttacgagcgtttcgttgtccctgaaggcaccaaaaaggtttcttatgagagggacacaaagatcatcaatgccgcgtccttcaccatcgagagagaggagcacactatcggcaacatcctccgcatgcagcttcacagagaccccaatgtgttgtttgccggatacaagcttcctcaccctcttcaatacaaaattatcgtcaggatacacaccactagtcagtcttcgccaatgcaggcatataaccagtctattaatgatctggacagggaacttgatcatttaaagagtgcctttgaggcanagatgttgaagttttctanggactattgatttacggtcaagattgatggtgttgcatttaaaaccctggca

SEQ ID NO: 730 - DNA, 367 bp, Glycine max
  Clone ID: 6HA-01-Q1-B1-G9
gttgtgttgcctaataataacaagccagacaagtcacagccagttttgccaaccgagaatggtcctgacaccaagtcccagttgccaaaactggtattgaagccttcaaatggttctgtgaagccacctaaccgtaaaaaggaagatcacaaggaactgtcatcgaccattcatgggcagcgtttggaggttgcagttcggtggagaccattgaaacttgtttatgatcatgacattaggcttgcccagatgccggtcaattgccattttagagtactaagggatgtagtaagcaaaagatttccttcgtcaagttctgttctgatcaagtataaggattgtgatggtgatttggttactataacct

SEQ ID NO: 731 - DNA, 375 bp, Glycine max
  unsure (1)..(375): unsure at all n locations
  Clone ID: 6HA-01-Q1-B1-H1
tccaagaaggaattgttaacaatgccattggaaccggcaagtgaaattgggccggtttcatttagaacaaccttcgggttaggtaaacccccggatctggggtccttaaccccccgccggaacggctgcacatccgggttcccaaaatggcaaccaataccctcaacggttccccccttcccaaaacccatcgtaaccgttgcaaaaaaagtgtgtccttcactggaacattcanagatggccaacacagtatcattctcaaaccacangacaaagatcctgcagtttgtgaaccttcagtacaagagaatttggtgggaagcagggaagcgctacgtaaagcttcgtctgtcaactaaggcattgcagacgata

SEQ ID NO: 732 - DNA, 297 bp, Glycine max
  Clone ID: 6HA-01-Q1-B1-H10
gtttagaaccatgacttgaacctctatctccttctccatcatcacaccttccaccatgaccgatcgtgaccgcgaccgagaccgtgaccgaactcgcgacagagaaagagaacgaagaagagataaggacgatcgtgaccgagacagagaccgagcacgcagcaagagatctcgctcgcgttcgcctgaccgtggccgctcccgccacgcgcgctctccctctcgcagcgagcgctcccaccgccggcggcatcaacggacgccgttccccgacccgccgcggaagcgccaccggag

SEQ ID NO: 733 - DNA, 308 bp, Glycine max
  Clone ID: 6HA-01-Q1-B1-H11
agtgagtgtgttgtattgtacggtaacagcggtgatactgttcacatcataaggtgttcgtttctgaaatttgtggcacaacaagtgagcgatgcggagagcttcaagggatcagagggataactatgaccgtaaagcacaagaagaaggttggcgagctcgaagtgcgtttaaactccttcagatagacgaggaattcaacctttttgatggactgaatcgtgttgtaaatttatgtactgccccaggtatctggagtcacgttttgagtcgtaaattgtatctcgcaaccaagcatgcacctgatg

SEQ ID NO: 734 - DNA, 338 bp, Glycine max
  Clone ID: 6HA-01-Q1-B1-H12
ctcactcaccctgcgctcaacaatgccacacttcaatcgcactaatggctgtcaacttctcaaaatcaaacaccgaaagagggcatcaaatccctcgatcaattccattctgggaaaacctatatttctggggatcagttgacaaaggatgatattaaagtgtatgcagctgttgttgaaaagccatgggacacttttcctaatgctgccaagtggtacgatgctgtctcttctcaacttgctccaaactttcctggccacactcaatgggtaagattcagtggcgctgctgctccaactgaagctgcacctgccaaaaccgctgccactgctgaaga

SEQ ID NO: 735 - DNA, 359 bp, Glycine max
  Clone ID: 6HA-01-Q1-B1-H2
gattgaagctagttagaacaagatgttgcagctactctacactgcgattttctccgaaatgcttttgattctcacgctcgtcttcaaaaccccactgagaaaactcgtcatcgtttccctcgatagtgtgaagcgcggtcgcggtcccgtggtggtttccaccgtgggcgccacattgatggtggttctcgcttcgagcctctacagcatggccaagatccagcaacgcaccctcgaggccggcatagtcaaccccaccgaccaagtcctcatgtccaagcacatgctcgaagcttctctcatggggtttctgctgttcctctctctgatgattgatagatttgcacattacataagag

SEQ ID NO: 736 - DNA, 405 bp, Glycine max
  Clone ID: 6HA-01-Q1-B1-H3
ctttttggctcaatgcaatgaaaaataatgacgtgttagctgaagagatttcagagcgtgatgaaggtgctctcaagtttcttaaagatatcaagtggagcaggatagaaaatcctaaaggattcaagcttgagttcttctttgataccaatccttacttttcaaataccatcttgacaaaaacatatcatatgattgatgaggacgaacctatattggagaaagccattgggacggaaattgaatggtacccgggaaaatgtttgactcagaaggttttgaagaaaaagcctaagaagggttcaaagaatgctaaaccaattaccaaaaccgagagctgtgaaagtttcttcaattttttcaaaccaccagaagtccctgaggatgatgttgacattgatgaag

SEQ ID NO: 737 - DNA, 261 bp, Glycine max
  Clone ID: 6HA-01-Q1-B1-H4
gaaactgaatagatcagatgaaagatacacttgtgacttgcacgactcatttacaatcgcgttcgagttctcttattatgcatctctctctatgctgttcttcgatccttaatacctcaggattcccactgatggtactccctcactccatccctgacttatccactacaatcatactctcctcgccacatatgattgcccaggacgttaatacctttcccattttcactaagacggagaatgatttttaccgagaaaatg

SEQ ID NO: 738 - DNA, 424 bp, Glycine max
  Clone ID: 6HA-01-Q1-B1-H5
caacagcaccgtcttactcgaagtatctgatttcaaatcttggattcgattccatcacttatagttctctcttctctttcttttcctttctttctccgccgaagatggcgccgcccacgccagcagttgaaggcgcccaggcgccgcaagggcggcagcaacagccgcaaggagggtttggcctcaccggaatcatacgcatggtcgttttctggtacttcgcttccaaattcttttcccccaaaaaacctaccgaaccttccgctctcatctccaatctctttcagaaagcacagcctctggatatgtggctttatctctccgagcacgagaagttcaatgactttggcagtgaaagttctcttgtatggcatgaaaccaatgttccatatgctgtttggggacctgagagtaccaggactca

SEQ ID NO: 739 - DNA, 253 bp, Glycine max
  Clone ID: 6HA-01-Q1-B1-H6
gtttaattttaagtgatttgggatgttatttgtttttgctttagtataaaagctgggttcgtaaatgtttaaataccatattgctcccatattgatatgggttctcaatgaatatagatacaacgattagcagcaatatatcaaatgcagagtaacagccaaggctcaggcaaaaaaaggtgatgatgaacttcttgtatttatagaattaaaaatgcttgggactgtaaatttaataaatttattctggaac

SEQ ID NO: 740 - DNA, 404 bp, Glycine max
  Clone ID: 6HA-01-Q1-B1-H7
caaagaatcaaagaaaggggtggtggctgcttcgaaagcttaataatttgtttatttccagaacatcatagttttcgcagcagcaaactaacaaattactcatatcatataataagatggcccgttctctctcgcaagccaaacgtattggtgtccttgttgctcaatctatctccctaagtcccgttcatcggcgaggttacgcagtggcatccgatgtatcggtaagagttggattgggtaatactgggcgaaggaatggaatcgtgggaggtgtataagagaagcctgatacaagagatggttcaaaagcctactcaactgattgggccccagacccagtaacaggttactatacgcccattaaccacacccctgaaattgacccggtggagcttcggcat

SEQ ID NO: 741 - DNA, 407 bp, Glycine max
  Clone ID: 6HA-01-Q1-B1-H8
ggaaagatgagtagttcatcaaggccggtgccgaggagagagagtccatggggagtcaccggagagaatcatcctgaacccaaagctcaccgctgcaatgaccgtgtcgaggacgttattcaggcttgctttgagggaaacccattcaagactgttccgggacctttcaagctcttctggcagtgcatgcgttccaaacccggtgaggaaccaacagccccatttacttatctggatttggagcctctaaagagagaaacggaacctgtgagacctgagtagtgtcacttttactttacaatgccttaacagctttggcactgcatgggcctttaatgggtttcaaatttccctccgtgttgattttttttttttgaaaaaaatatgttactaaattgtttttggtg

SEQ ID NO: 742 - DNA, 359 bp, Glycine max
  Clone ID: 6HA-01-Q1-B1-H9
atttgattttttttctatattgtattgcatatgcaaaatgttaccagcagcagttaatttttgaagtttaatcattaataaaaaaaatgttaaacacctcaatttttgtttccatgtttataaccagagctacacacaagacacagttttgttctgtgcagcatattctatagttttcaacagaattgggctagtttcaaaatctagtcattagccaatgaatgtagtgccaaacctaagaaagtgacttaaatataaaacttttctataacttgaggcaaaggagtcaggaatgcatttgctctggtcctatacttgtatctatttttaagttgactcattggcctggcatgttgtgc

SEQ ID NO: 743 - DNA, 352 bp, Glycine max
  unsure (1)..(352): unsure at all n locations
  Clone ID: 6HA-01-Q1-E1-A1
ttttacccaacaaaaatgtcttgttacataataatgtacatgacagggagcaaattccttagaatacgtgtatatgttacatacaaatactaattctgtcaccagacataaatgtaattggaaataaatcatcgagtataaagaatcttganagacgaaaacaaccatgaacctgtgaatgaatacacacgagaaaacgttgcaaagctccaactcaagaagtcaaatttggttgctatcttttatctttataccaatattttagttacaggataagaccaatgttctccttcatattctgcttgatgtggagcgagatgaaccgccacgactacttccatttgaatgatct

SEQ ID NO: 744 - DNA, 175 bp, Glycine max
  Clone ID: 6HA-01-Q1-E1-A10
gggtcgacccacgcgtccgagcacattcaaaagctagcagaatgcaagaaataactaaaatcagagcagaactgaaggaaatagagacacaaaaaacccttcaaaaaattaatgaatccaggagctggtcttttgaaaagatcaacaaaattgaaagaccattagcaagactaat

SEQ ID NO: 745 - DNA, 444 bp, Glycine max
  Clone ID: 6HA-01-Q1-E1-A12
gggtcgacccacgcgtccgtatacctgtgccgctgatctctagacctgccatgagtgtgaaagaggcttcgttttttagtgacactttacccaaccaattttcactcaagaatcttcatattctattgtctcacaatcagaataaattggcattttcctcactcagtctactaggtgctttaattgtgtttagaaatagccttttgattcttttggatttgttttttgccctaagagtcttgatttccgtactaaattacctgacaaaactcactctctccaacatcaattaaagggatttaaaaaatataattacacttaaaacactagaaagagtcaagtttttagcatatgttatggcttgccagtacgagaaaagtgacttaacatccaaataaagaaaaatagttagccaatccattcattatgttgatatgatcaggt

SEQ ID NO: 746 - DNA, 396 bp, Glycine max
  Clone ID: 6HA-01-Q1-E1-A2
ttataaaaactaagctcacctccttgacaaaatacatgaaaatacaaaaaaaaaagtccctactacaaagactactcaaaatgccctgaaatacaaggctaaaaccctatactactagaatggccaaaatacaaggcccaaaagaaggaaaatcctattctaatatttacaaagaagagcagatccaaccttgaaccatgggctcaaaaatctaccctaaggttcatgagaaccctagggccttctttagtagctctagcccaagcctcttggagtcttctatccaatacccttggggggtacgattgcatcatcccctccaccttggaaaggatttgacctcaaatcccgaggttcttcatactctagtctccttccctcgacacccctaaaaag

SEQ ID NO: 747 - DNA, 344 bp, Glycine max
  Clone ID: 6HA-01-Q1-E1-A3
gaacagtaatatacccatttaatcttttgattcatgcaaaccacaactaaaagagaaaatgatcaagagcgccataggaatcacataaaccttaacaatcttcaaaatagcgaaagacttcgctcgcaacagtatcaaaatagttaaagactaagcacatgtaaaggcataagcaaaatgcctttttacatgtacaataatcctttcctactaccaatggcgcccatagtcaacggttcaaacaaaaaaacgatcctatgaagtcttataaacagcactgttatcagttatcactatccctagaactgcaacagatccttcaacaaaagaacattgagctcgaa

SEQ ID NO: 748 - DNA, 383 bp, Glycine max
  Clone ID: 6HA-01-Q1-E1-A4
agtcgattggctaagaatctcttcaataaaaattttatagaacaaaacaagttttcaattcaaagactcaaaatctggctacaactatataaaaaagacctaatcaaacaagccgaaacccatgtcatcgtcactttcttccttcacttcttccttcttttcctcggcggcgggtgcggctgcagcggcagcaccaccaccggcggcgggagcggtaacggcagcggcggcaccaccaccatcaccggcgttcaaaatgaggtcttcgatgttcttattctgggcgagcttggcgaagaggctgggccagtatgactcggcggagacattataggccttcaacagagcgttgatcttctcagcggtgactggaatttcctcgt

SEQ ID NO: 749 - DNA, 388 bp, Glycine max
  Clone ID: 6HA-01-Q1-E1-A5
aaaaatatattttctaggtaaggaaagcataatcaatacacaacagtgacaagtgacagcattacatcaaaaaatttagggaattaatattttcccaactccagcggcacagcttgaacttcgactatagtgatattacaacaatttatagtataaatttaaacttcaaagatgtttatttgatctacatgcttgagcttaatccttatgatatgatggtgattgattgttattattgataacaatttatgccttgattaagggcttggagttgatgggctttggtccaccaaataatcaaaaccagaagaagggtttggcgggctgctccagtaaaataaaaaagcacgcctcagccgttggtttatttgtgagcttagaactgaac

SEQ ID NO: 750 - DNA, 396 bp, Glycine max
  Clone ID: 6HA-01-Q1-E1-A6
taaatttacatttgaaatgcacccaagtgtaatttaatgaaacattaccttatatatgtcaacagcttcatgataaattttaccaattgtactgaaggttttatatttcacacgacaagatattacatatattggttgcaaaattgctactaccagcaaatggaaggcaacttaaagcttaaagagaaagaagaaggcacatgtcctgtccttctgatatactcaaccctttcagtagccctcaaagctttgtcattcagcttcacttgtgcattagctcgtttctcttcagctatcctcttagtcgaagctagtttatttgtaaacctttcttgtgccaatgctttcattctctcagccttcacctctattttcttcatttccatttcagctttt

SEQ ID NO: 751 - DNA, 246 bp, Glycine max
  Clone ID: 6HA-01-Q1-E1-A7
aaagcaaagaataagcattgaagtattaaaaaaataaaattcaatgatttattggtttacatagttggataagaaaaggataacagaacatatctgtgtaagcctactaggtaatctgaaaagcaaataaaaaatatggatcatgaaagagagaaacacatccaaataagatgtcaaaagtagaaacccaaattcttatcaagggagatggacaattaacttgggaaatgagatgaatcaacaggg

SEQ ID NO: 752 - DNA, 384 bp, Glycine max
  Clone ID: 6HA-01-Q1-E1-A8
aattaaactcatatttccattctcactttatatattttctttagaaagaggtgcaatatggctacatccattagaatcccaaggacaaacaaaataaacagggataacaaggaacaagaaaacaccaaaactcgctccatactaaaggaatgtatgaaaagggattgaaaagagggggaggggatactggaagctacattctttaaccactctcttgtcttgcactgtcacgggtttagcagttctttgaacagtcttcagatgcttgagttgatccattcacttctaccagcttctccttttgtcctgcttcatctgtagtagctgattcattcttcaaggctccatcatgagacttgggcaacatacctgtcccatttgttg

SEQ ID NO: 753 - DNA, 197 bp, Glycine max
  Clone ID: 6HA-01-Q1-E1-A9
tccgaatttaatttatttctgattattttatccagagggtacttttttaatggatatttgtaaatcttccacttaaccactgaaaattattttgttttaatcccacccttccatccatacctctgcctccccaaaaagctcctattaatttgcttatccccctcatgtagctagttgaatgtgaataaataacatgg

SEQ ID NO: 754 - DNA, 386 bp, Glycine max
  Clone ID: 6HA-01-Q1-E1-B1
gtcgcctaattcaactaataatttagtaaaaatactaaattgatttgtcttttacagccaggggctggaattcaaagaataaaaatctatcaacaaaagcgatacaccatctatggcgagtatatttcaaagaattaaattgcctttatagagaagaaagtgttttaaatgaaaacggagaagcagcaatcagagctccaatgctgaaccatcccacgagtcaatggagtgacttcaagtggaatatctggcattttggaacatatgaactcttggttgaagcctgttcaaacttcttaacagcagcttcattctcctctaagttaatctggaggaaaaacttgacccaccaggatgaactcctcatcttggccgctcttccaaat

SEQ ID NO: 755 - DNA, 357 bp, Glycine max
  Clone ID: 6HA-01-Q1-E1-B11
attcgtaaattataagaattcactaaaacaaaacaaaggtaaaaacaactcaaaattggcccaggggtttttcccagtcacatctatttaaatgtcaaaatagtcacactgagacatcattaacgactgcctgattgctttttcacacgaactgccacctgccacaaacttacttcatctggacaattccagcactgaacagcttttggattttagtcatcaccattggattcttcgtgtgttcctgtacagccttgggactttcctggacatccatcaatacctgtctcaaaacacggtctggaaggatgttctgaatgtctggatactgcactaccttggccggtcgctccttca

SEQ ID NO: 756 - DNA, 375 bp, Glycine max
  unsure (1)..(375): unsure at all n locations
  Clone ID: 6HA-01-Q1-E1-B2
actaataaaaaatattcgcaaaaggaaaagtttgacaacacaaaattgtaaaatccaatctcaaacagttaacaaaaaagcaacccaaactaaacaatcaaggtgcttgttgttttcaacatctactcttccagtattgttcccttctcactaacataaatgccatcgagaaatttcctgatatccttctttttaacatggcatttctggttaatgagagcacaggacctagaaacaagttcaatgtcgttcccatccaaaatcaattcatctttaactttttcagatcgaataacggaaacaccgttaagaaggtccacttttctcancttcttttcgccaaggaaatttctgatctcaatagacttgttgtcg

SEQ ID NO: 757 - DNA, 349 bp, Glycine max
  Clone ID: 6HA-01-Q1-E1-B3
ccagaaacaaaaaagcgaggtttgatcatttaaaaataaaaatccgttactcacagtattaattaacttccctctttctgtgttttctcacatttatattccttcaactcatgttgtacattttagatcaaaagttttgtgtatcctaacatgtaaaggtgcaaacattatctatatgagcttgtattcgatcttcagtacttttcttccaatcatggagctgcaaagtaacaccaaggaacatctccaagaatcacccagtctccttccttgtcatcatacctgagcataaagtcacaagaaacatccagcaattttgaacgcccatctgttccaacttcagtaccat

SEQ ID NO: 758 - DNA, 184 bp, Glycine max
  Clone ID: 6HA-01-Q1-E1-B4
aattcccgcgccgatcaactaacacaatcggcggcggccgttcttttttttttttttttggacgtgaattgaaaacatctctatacaacttcaggttcaaactcgtttttttacaggaacaaatcacctcacaagaggaatgattgggaacccattatcagtttcaaactgccatttcaaggga

SEQ ID NO: 759 - DNA, 327 bp, Glycine max
  Clone ID: 6HA-01-Q1-E1-B5
aatcaacacagaccagagtgctaattaaattaacagacttgagttcaaacaaaaattgtaagggtggtgctttaaaactcatgatctccataaagctaagggcgcagaccatcaaacaaaaatttctcacaactataatatggattacaaactgtcttctcaaggaccttatttcttgtcctccttctctgcttcagcagccttctttaggcgggcaccatggtggcgtttgttggtgcgttcaagacgaaacttatagtatgctttgaaggccttcatttcatctgttaccttaacaaggtcaacagttggctttcccctcacaat

SEQ ID NO: 760 - DNA, 373 bp, Glycine max
  Clone ID: 6HA-01-Q1-E1-B6
tggacgtaaattgttattatatttagacgattatataaaaaagctcgattagatacaggaacaaatctattcccactagcaatgagagggaataatttatttgactgactcagcttgataaagcggactttgaaaattacaatgcatgcagacaactgcaaacacatgtagaacacagtgccttacaactgtctaataaaacaaaagcacaataactatttaattttaactagatagagccctctaaataataatcaaacatttatacttctttgtggatctgcaagctgcagatgcatcttcccactccatgactttcattttcacactttctgtatgcatccatgtgggggtgtgaagagaaagtgctacc

SEQ ID NO: 761 - DNA, 395 bp, Glycine max
  Clone ID: 6HA-01-Q1-E1-B7
tttaggaccaaaaagtattgcaagagttttgttaaagagatgatagtacacagacgttatccccagaagcaccctttgccatctaacaagttgctctggaagctagaaacccacccaacccagcttcccttatagtacacaaaagaactgcaaaattactataattttctacagaattccctatgaaatgaagacaattgctctagtggagttgagaggacaaaatgcctactcacacttaatggatcgataaatgtggcggacaaagaacaaagcagcacggaatccaacggttccaagcattaagaagaaaccatagcatatacaggccatgtatccgaagaaaaatgaggtctgcatgaatccagacatgtcggagcgtgcatagtagtaat

SEQ ID NO: 762 - DNA, 396 bp, Glycine max
  Clone ID: 6HA-01-Q1-E1-B8
gataagtgaatttattatttctcaaagtcaggtcaagcattatgatacatcataccccaaaacaccaacaacagtacgcaagtgagcagttagtacatcgtactttcacatgaacgcgtcataaaggcagataaaagcacatacatacagcacaggaccttaaggctcaagcacagcacaatactatgtgacttaaacggtgacacagttcagcaattattcttaaagcactacggatttgctgaatttgttcataattttagagccttgttagtgtagaatcacacattcgtgtgaaccagctaccaccacagtatggtgttcgcttgtgctgactgcatcaacttcgttgacactttcaacgttgacatcctccaattcaccacagccaatggc

SEQ ID NO: 763 - DNA, 446 bp, Glycine max
  Clone ID: 6HA-01-Q1-E1-B9
gggtcgacgcacgcgtccggtctggaggaggcctgattcagcctggggaatccctgagactctcctgtacagcctctgggttcaccgtcagtcgcggctacatgagttgggtccgccaggctccagggaaggggctggagtggctctcacttatttatcccgctgatggcacatggaactcagactccgtatactacgcagactccgtgaagggccgattcaccatctccagagacaattccaagaacacgttgtatcttcaaatgaacagcctgagagtcgaggacactgccgtgtatttctgtgcgagagccacctattattatgaacaacactggggccagggaaccctggtcagcgtctcctcagcatccccgaccagccccaaggtcttcccgctgagcctctgcagcacccagccagatgggaacgtggtcatcgcctgc

SEQ ID NO: 764 - DNA, 382 bp, Glycine max
  Clone ID: 6HA-01-Q1-E1-C1
aaaggaaaaaaccgttcaaaaattataccaaaaaaatggttaaaaaagccaaccattaagaaaacaatttttttaaattaatgcaaaaatttgctcacaattgtactacaacgcacaagttgcctgacatctcagtccatcctcaaattttcatggcttcatatgattcatttaaccgtcgcattaattcactcattggcagtgataagatctcatcttcttccaaactttttggatgattttccttccttgagacccaagtacttgtctatatcctctccatcataatcttcttcggccctccgtttcttcttccctccagtctccttcattttcatgacggctaatcttttggcctcaccaacacgctcttccaaaagca

SEQ ID NO: 765 - DNA, 448 bp, Glycine max
  Clone ID: 6HA-01-Q1-E1-C10
gggtcgacccacgcgtccgaagaagttaacctttttgcattaggccagtttacgttaggcaaaatgctaagaaaattaatctgtacaataccaaaggcattattatattccaaatcccaaaagtctttcttgcttcttgtagcaaggtgcattagctgactaacagtatttccaggtagaaaaatggaaaggaaaatgctgagcctgttatagagaagagcttaatagactcgtgtgcatacattagccttctgactctggattgatttgcagagtgccactgccaactccatctcagggagtccatcattaacacttccactgacccctccagccctgccaccctgccccaaattattttgcaagttttccaaattgatactttaacttaatatttccttaaagatgagaaagtttaagcagattcaagactagtagaattgatgtc

SEQ ID NO: 766 - DNA, 404 bp, Glycine max
  Clone ID: 6HA-01-Q1-E1-C11
gcgtccgattcaattggctcgatgctgtctcagcacctcatttagggtacaatatgctgaggaactgaccaaaggtccctgaacagtgagagatagggaagagcagaaatccgttcctgtaccaagtgtctaacacttaatataggtgagagctggcgtgagattatctgtgctgtggaaaaatgaggacctatcgatacctctaagtatataatcactgccgtgtcacattttaattagctccttgaggctatagaaagaagttcgcttcttatcctccaaattaagcatcacttttacaaacaatcaatgttccattttcaaaaccccaagtagagcaatgtttgattttcattactttccagctttgaaaatgtttcatttttagcaatatgttataggaa

SEQ ID NO: 767 - DNA, 462 bp, Glycine max
  Clone ID: 6HA-01-Q1-E1-C12
ggtcctaaattaccgggtcgacccacgcgtccgatcatttattaggagaaaacttacaagcagccagcaaacatataaaaaatgctcaacattactaattaaaaccacaaaattccaccttacactagtcagaatgactaggaataaaaattaaaaaaaaataaataaaaaataaaaaataataaaaataacagatactggtgaggctgcagagaaaagaaaatgcttatacatttctggtgggaatgtaaatttccagccaccatggaaagcagtttagagattctcaaagatcttaaaattaccatttgatccagcaatcccattactgggtatatacccaaaggaaaataaaccatgctacgaaaaagacatgtacttatatgtttatcacagcactattcacaatggcaaagacatggaatcaacctaggtggccatcgatggtggataaagaaaatg

SEQ ID NO: 768 - DNA, 341 bp, Glycine max
  Clone ID: 6HA-01-Q1-E1-C2
tttttggaaaagggaaaggcaaccacttcataatataacaatgacacactatcaatacaacgcagcatgtaatcatgataggaccattgactataagcaggaatgatcctcacaacataaactttttcacacaatccttcccttcagatgtgaaatcttttccttccagatattccacaccctttgatcaacccatggcatactatatatataaattgatcagacaagtcactttgcattgtctgccaacagctcatattgcataaactatttctccactgctatcaatgtctaggtcgggatccgtctctacgtcctcgtccatgtcgtcgtcatcaatg

SEQ ID NO: 769 - DNA, 355 bp, Glycine max
  Clone ID: 6HA-01-Q1-E1-C3
gaaaacaaagtgttcatcaagaacgatctttatctgtattaatactacccaagttaaatgaacaatgggaagagtaaaagatcaaaatgcattgtgccacaatctagatctaaatactttttcaagttaaaattgcaaattacaatcacaaacaaattgatgctttttgtctataatcttcctagtcactagtacagtagtatttgacgtggcaataacgaacaaatacgcaattgtaaatcagaaaccactatgtccacacaaatttgtgaatcctctctgcttacatgtaattgtccacttagacccttgttttcaagaacagaagaataaactcatgctggcaaatgaagct

SEQ ID NO: 770 - DNA, 339 bp, Glycine max
  Clone ID: 6HA-01-Q1-E1-C4
gaacggaaactaacgatacccataaataaatcctggtagcttcaagaaaccccaggtatataggagacatgaaatttaacacagccaatcagcaataactccaacattaaactacaaaacgagatttatcaaaacttggcgagtataaaggaggtaaatgtccaattaacagataagattgctctaaagttacaccttgatagcatatttcctcagtgggaaatataactctttcttcttctccctctctgtcttcaatgatgcctggtgcttagtaagcctcctgcgaatggacctggtcttcttagggcggagatcgagaggcaagtacttcgtgtt

SEQ ID NO: 771 - DNA, 334 bp, Glycine max
  Clone ID: 6HA-01-Q1-E1-C5
agcccaacacttattaggatccagtgatattaatacaacaataatagttctacatattacactcccttacaatttagaaaatgtgtaagggggatccaaaaccatagcaggagaagcatgtatagaacacgcgaatgaaaatccgaccaaccaaattgcaaatatgaatttgcaggggaagataaggttattaaaaatggaggttctaccctaggatgctacggcattggattcttcatcatcaagaaaggggtagtcagtataaccaagaaccggatcagaagtgtagaatgtctcccggtgatacttgttgagaggggcattgagagcaaat

SEQ ID NO: 772 - DNA, 389 bp, Glycine max
  unsure (1)..(389): unsure at all n locations
  Clone ID: 6HA-01-Q1-E1-C6
aacataagagttgagaccattacattctagtattgaacgtggtcacaccatagatacatacacattagtgaaatggaggcacatgcttgcttgtgctaatttctggatagctatagagccatgcctcactgatcacttacacacataagagaaacacacatgcaaaagaaaccctaaaacaacctaaacatgctagctaattatttcacgacacacatgacatgacactttgacctatataactattgcctaaacattattttttataacctattcttttcctacttcctaaaacacttgacactcacatttaagctagcataagaacacactacacatgctagtgaagggtgttacattatcacttatcctgntcttcgttctgattc

SEQ ID NO: 773 - DNA, 355 bp, Glycine max
  Clone ID: 6HA-01-Q1-E1-C7
ggaacaatgtttaataatttggaatctgaaaattgtttttgtttcagacgttccttaatgtcattgcaacaacaaccacaaatttccctccctagatctcttatctctcactatgattacattgatgccttctgtcaataaataagacagaaaaaaaaggcaaaatagtggtgaaacaccaccccaatctacgtccaattaaaggaagcaaggttgatcagggaaaatagccccttaataatccatgccacccatgccaccacccatggcaggaacatctttatcgtccttcgggagttcagacacatcagcttcagttgttgtcatcagagatgacacactggctgcatcaaac

SEQ ID NO: 774 - DNA, 249 bp, Glycine max
  Clone ID: 6HA-01-Q1-E1-C8
gttatcttatttttgttctttgttcatattttcggtattgtctttccaacaaaaaggggaaactaacctctttacatagcttcacacaaaagggggtgaaatagaaaccaaaagttgttggataaaaaagcaaaaaaaggaaaaataatgggggggcactacaacaatatatgtccagtaaaagggcaatgtttataagacattgctagccactaaacccccaattccgggcatcccaggttcaaaagg

SEQ ID NO: 775 - DNA, 400 bp, Glycine max
  unsure (1)..(400): unsure at all n locations
  Clone ID: 6HA-01-Q1-E1-D1
ttgcacaaccacgattttatttattcattgaaacgaaggaatacaacatcacgacacagaatgcttgcacctagtagaagtgaaaacactgtcgtgtaaccacacccaattctccacaacaaaaatggagagaaaaggagacacacacaaaaagataaccaaacaagaagataaccacaacaaaagtcatactcttaactaaaccttcttatgggtcgtagctttccttttctaaatcatcattatttaattgtaagtacccccagttccatacccataatcatttgggtttccccccgcacgggtattatgggccgtagcagtcccacccgggcctctgttggttccaatanggtgtgagcccaccactccctcggtgacatggcccgtgggctgtccg

SEQ ID NO: 776 - DNA, 379 bp, Glycine max
  Clone ID: 6HA-01-Q1-E1-D10
ggtcctacattcacgggtcgacccacgcgtccgaaggacctggacacaaatgcagacaagcagctgagcttcgaggagttcatcatgctgatggcgaggctaacctgggcctcccacgagaagatgcacgagggtgacgagggccctggccaccagcataagccaggcctcggggagggcaccccctaagaccacagtggccaagatcacagtggccacggccacggccacagtcatggtggccacggtcacagccactaatcaggaggccaagccaccctgcctctacccaaccagggccccggggcctgttatgtcaaactgtcttggctgtggggctatgggctggggccaaataaagtctcttcctccaatgaaa

SEQ ID NO: 777 - DNA, 422 bp, Glycine max
  Clone ID: 6HA-01-Q1-E1-D11
gggtcgacccacgcgtccgaaacaatgagaacacatggacacattaatgggaacatcacacaccagggactgttgtggggtgcggggatgggggaaggataccattaggagatatacctaatgctaaatgactagttaatgggtgcagcacaccaccatggcacatgtacacatatgtaacaaacctgcagattgtgcacatgtaccctaaaacttacagtataattataataccatacaatccacagtactcatagatgacacatatccatggaaacacattccatgttcatggattggtagaatcaatattgtgaaaatgaccatactgcccatagcaatctaaagattcagtgcatttactatccctatagcaatattatttttcatacaattatacaatattatcctagtattcatat

SEQ ID NO: 778 - DNA, 457 bp, Glycine max
  Clone ID: 6HA-01-Q1-E1-D12
ggtcctaaattaccgggtcgacccacgcgtccgaatttaacctactagacaatgatgtgagtacccaggatgatttcctggggcacagtgggtgaggagatggggacaggtgaatggaggagttaggggagaggaaaagtggatggaagtgtctggaaagggcacgagagagtcttccaggtactgatcctgtttcttgctctgagtgctagctagccagctgtgttcacactgtaaacattcatcaagctgtacatttggtgcacttttctgtgtcataccacaataaaaaaaaacctatcatcttacaaaaacaagacacccaagtccaggcccaaggagtaagtacaaatattcctgtttctgaaccattactgtaattggctcttaaggcttgaagtaaccttataggttactcataaggcatatacaaataaacttgtttgttttctttttt

SEQ ID NO: 779 - DNA, 285 bp, Glycine max
  Clone ID: 6HA-01-Q1-E1-D2
tgtttttccagataataaaaacttcagcgtccttaataaaatatgcaatttggaaaacacttgaaaatggaaggacaaactaaaaacggcccagtacatccacaatcataacaaacatgaatgcctaaaatctcagtaccaaagagatattagcaacaaacaccttctcccttcaaaaagatatggaggagaagttcaattctaattagcagtaaaatatttttactggtcatcctgtttcggtgctgcttcgttaatttcatctgctccatcatcctgcatgtc

SEQ ID NO: 780 - DNA, 397 bp, Glycine max
  Clone ID: 6HA-01-Q1-E1-D3
gatcaatgaaacaaggagaaactaacgtgatataattatataaaattgtacataggaagtgataatgtgaatgtgacacggtaataaaattaggtggaaaaaataaatgagaagtatggatgtaacaaagggtagcaataataataataataatagcagtaggaaagtgaaagggagaattttaaatgtcacggtctggtttgcactcaggggagagttgagggtagcgttttctgtcagtgcagtagttgtagatggtgtatttctggcgcacccatctgaggctacgccactgggaagcgtcgaggtcacggaattctggttggtcccaccagctcttgccctgcgtgtcgcagaacttggcgttcaccgaggcctcgcacccgtcgatgtggaa

SEQ ID NO: 781 - DNA, 314 bp, Glycine max
  Clone ID: 6HA-01-Q1-E1-D4
aaaacaggccaaaaatcgttttagtcatcaattgtttacataatacagcatacatccaatttggcaaagaaaaatacaatttctggtaacataggccactagttacagcccaattgcaagaccctaatcttttaaaacttcaacgtgggcgttactacataacaaactctgttcttggagaactatattgatggtaaatcaacaactaatgaactaacagtggattcactgttttgcacactcagtgtgcataatcattggtggcagaagaaatcaaaaggtgtccgtggtgtggaataacccatggaaagtat

SEQ ID NO: 782 - DNA, 249 bp, Glycine max
  Clone ID: 6HA-01-Q1-E1-D5
gcacgcaaacaaagtgatttattaaaatccattcgatgttcaaatgggaagagtaaaacagtaaaaggtccaaacgccctaacaatggtctaacataaaagggaaaaatcaccaatgaaaaagaatcactgtctggaaaaccagacttaatttcgcaaggacacaatagagacacttaagaaaactactctacttcagcttcatctttccaacacttcacaattgataaaggtgaacgacagtcaaaag

SEQ ID NO: 783 - DNA, 384 bp, Glycine max
  Clone ID: 6HA-01-Q1-E1-D6
atcataatctcatagatcgattgatttcatcatccaaagtatggtttattataaagatttaagctctacacagagctgcattttagaatcatagttagatacacattcttcacttccacttcttgaacccaccaccatgcttgccgaatttgccatgctttccatgcttgccaaacttgccatgctttccatgcttgaacttgccgtgctttccatgctgcttgaattttccatggggcatgtgagcaccatgtgcagcatattggccataggagccatgggagccatgagagacatggtgagcaccataagcagcagcagccgcggcagcacccccggtgagcattgctcccatgccgccgtgcccatgagaaactggtgcat

SEQ ID NO: 784 - DNA, 382 bp, Glycine max
  Clone ID: 6HA-01-Q1-E1-D7
tttggcagagtaaatcaaagactcaatattttgaccgggtcaataaccatacatcactacaatttaatgttacatagagacagatcagtgagagtgaatgatatatggtctctagtcattgttcaaactgaaacttggaatttatcaatctgttcgtagaacaaagcatgaaagtgtatatcattagactgtttctttgattgcatttacaagtatcagaaataatgtacatataagcagcagtaaccctgtacttccaatgtcagtatgaacatactatcctttccttaattcttttgatatatgaagattgcaatgcatgaattgtttcaatactcagccacaaaatcttttgcagcctgaccactttgacaagcatccc

SEQ ID NO: 785 - DNA, 188 bp, Glycine max
  Clone ID: 6HA-01-Q1-E1-D8
tttgttatttttttttttttttcttttatttgattgggtcattattcatacatcactacaatttaattgtttacaaagagacagggcagtgagagtgaacgataggcgggctctagccatggtacaaacagaaacatggcaatcatcgatctgttcgtagaacaaaccatgaaaatgtataggcagaa

SEQ ID NO: 786 - DNA, 458 bp, Glycine max
  Clone ID: 6HA-01-Q1-E1-D9
ggtcctaaattaccgggtcgacccacgcgtccgatattttctgacctgtttgctgaagtgatttgcgaattgactttcctagggtgttgcctgagtcctttgaaatctccttctgacatctttcccttctgttgtgaaatatgttaagccacaggccaaactgctataagatcgaagtttgtttttttctcacctaataatagagaggtaatcagatggtctagggcagatttaactctacaaggttatcaggaactttgtttccttctgtcttattcagccattcccagtatgttttcttacccataagatcaaagcagactcatcagctccatatctgcattccactggggaaagagagagagaaaagagcagatttttaaaaaaagatatgactgagcattgctcagatcactgtggccaaactttgctgaaagagatgctgggacatagaacct

SEQ ID NO: 787 - DNA, 295 bp, Glycine max
  Clone ID: 6HA-01-Q1-E1-E1
aatgtatccaccttggtatttaatcaattaccttgcgatactattctaagtaattactaataccatcgaattcttcatatattttttttaaaaaaagattcaagtaatgttctaaatcaaatgcacgtcttttaccaacgggtttaaaaaaaacgagggcgcagttaaacacaggtaaggaaacatcttgagactaaatcattcaaaattttcaaaggcggatatttcattgactcaataaaaggccggtaaactttggcaaaaaccacttttacgactcggaatccccccaaaa

SEQ ID NO: 788 - DNA, 462 bp, Glycine max
  Clone ID: 6HA-01-Q1-E1-E10
gtcctaaattcacgggtcgacccacgcgtccgacgggacctcatcagccatggtcagtatgacagaaggtaacattgatgactcgctcattggtggaaatgcctccgctgaaggccccgagggcgaaggtaccgaaagcacagtaatcactggtgtcgatattgtcatgaaccatcacctgcaggaaacaagtttcacaaaagaagcctacaagaagtacatcaaagattacatgaaatcaatcaaagggaaacttgaagaacagagaccagaaagagtaaaaccttttatgacaggggctgcagaacaaatcaagcacatccttgctaatttcaaaaactaccagttctttattggtgaaaacatgaatccaaatggcatggttgctctattggactaccgtgacgatggtgtgaccccatatatgattttcattaaggatggtttacaaatgggaaaatg

SEQ ID NO: 789 - DNA, 380 bp, Glycine max
  Clone ID: 6HA-01-Q1-E1-E11
cgcgtccgaatcaccagatatctataatactaactcattataataataagaaataagaagttgcagtggtaaatcatgattttttcaacttcatgacttcgtattttttttctggttatttctagttaaatctatttcactactgacatatgtaccaccagatatctgtagtataaactcattatttcacataaaaataagaatttgagtctgtgaagactgtgctttcaaacatcactgcactccagtgtaagcaacacatcgatgtgctgtctcaaaacaagatagaattagaacgaaaggaatgaacaaacggaataaaggaaataaagaaagaaaggacagaatataatgaagaatgaaagaataacgaaggaaaa

SEQ ID NO: 790 - DNA, 417 bp, Glycine max
  Clone ID: 6HA-01-Q1-E1-E12
gggtcgacccacgcgtccgaaactgctacgaggaggtcaaggaccgctgcaccctggcagagaagctggggggcagtgccgtcatctccctggagggcaagcctttgtgagccccttctggccccctgcctggagcatctggcagccccacacctgcccttgggggttgcaggctgcccccttcctgccagaccggaggggctggggggatcccagcagggggagggcaatcccttcaccccagttgccaaacagaccccccaccccctggattttccttctccctccatcccttgacggttctggccttcacaaactgcttttgatcttttgattcctcttgggctgaatcagaccaagttccccccaagcatcccagttgtgggggagcctgtattttttttaacagcatcccca

SEQ ID NO: 791 - DNA, 393 bp, Glycine max
  Clone ID: 6HA-01-Q1-E1-E2
ttcatataaacatcttctatattatttcttgtccctaacgaatttccaactattttctcattcgtataatacacatataagaaaattacagagacacataataataataattataattaaactcttattcctaaaagagactcgatcttgctcgagtacatttgcttccttgtgacacagatgaacaaccaagccgattgttgtggccgaaccctaaaatcacttcagcttctgttcttgcacttttccacggctcttggtgcaaggccgatagcctcagaacctttcattatgcgaaggcgctggcatgattcaacgaacatttcccagggcacgtcaccgacgagcatccagtctccgtccttgtcttgaaaatgggtacaaaatcagagc

SEQ ID NO: 792 - DNA, 358 bp, Glycine max
  Clone ID: 6HA-01-Q1-E1-E3
tgaacactacaaatagaaagttgacatttaataaaccaaagcaacacaacgcagcaaagtcctgaaactcgctgcgcttaacaaaaatgtaatcaggggttccgacaaacacaacacattaaaacacagataaataaaagcaattttgccaccgtcgatcaagaacccagttctgggaacaacagttgcgagatgatggtggagacttcaaactttgtccgaaaaacaagctacctagaaaagaagacacaagagtacagaaaagaaaccaacatttattgtaaccaacatcccctgatgaaccagcccgcacgattcacttcttcttctgggcagccttggtgaccttggctccggt

SEQ ID NO: 793 - DNA, 392 bp, Glycine max
  unsure (1)..(392): unsure at all n locations
  Clone ID: 6HA-01-Q1-E1-E4
ttttgtaaaaaacagatgtattgagatattataagctatgctctagcggactgtacatcattcatccctttacccacccaaaagaaaatgcaaaaattttacacctaatctacatgcaactaactattaatcttcagggcgttgaatctcacccatcatgatccggttactggagaccttgaaactgagaagagaaggatctatctgttttcctttcttacctttctttttcccgcatcgccctgcttgtgctgcatcggatgactcgctcccgattccactggctgcatgtgagtcaaccagcacctcaggaagaacgggctttttgagcatatctataaatgatgtctctgacacagcaccttcactgaaggangaagatctaaaccgaa

SEQ ID NO: 794 - DNA, 361 bp, Glycine max
  Clone ID: 6HA-01-Q1-E1-E5
aatgtaaccaccttggcatttagtcaataacttgcgaaactaatctaggtaaaaactaagaacaaaaaattcgacagaaagtccacataagtacaacattcaagtactacgccaagtcatgtatgcttcaagcaacactaaatacaaatggaaccatagcaaatagatgcagaggtatggaagcagcaacatattacagcagtccatgtaaccactaccaaagatttcattgactcaataatagggtggtgcgccttggtacattccaccaggatgtctcgccaacggaacccgcggatgcagctgatgccccgacgaaggatggaagccatactgccagccatcatggtaaccccaacat

SEQ ID NO: 795 - DNA, 392 bp, Glycine max
  Clone ID: 6HA-01-Q1-E1-E6
tatttaattgcccaattttataccgttctcaactgtcaaaataaatgaaaaggctacaaaaggaagtatagcaattagaccattcaaattaagttgcaatgtctttgtgggtatagacaatccctttatcaccatccactacttgtccacttccttttagtatccatcttgttgttaacaatccctcaactcctactggacctcgagcatgaatcctgctcgtactaattccaacctctgcgcctagtccaaatcttgccccatcactgaatctggtgcttgcattgtgaaaaacagcagcactgtctacttggcgtagaaacacattagcaacttctttatcttctgcaacgatggagtcagtatgtgcacttccataaagatctatatga

SEQ ID NO: 796 - DNA, 291 bp, Glycine max
  Clone ID: 6HA-01-Q1-E1-E7
agaataatacgttaacattcaattaaagcacatgttacaataacattccacttgtttggctttttgaagcttggtggtcttaagaacttggcctgtttctccaccaagaaaaataacataactgacgaaagtaaaatccaattttttgataaattttacaaaccacgggccttcatgcattgataacatatttgaacaggatcttgaaggtatcgtgcaaaaggtctaaatacagcgtgggaaaaaggtttgcccgacataccctccagccattgccctcctcacgttaga

SEQ ID NO: 797 - DNA, 383 bp, Glycine max
  Clone ID: 6HA-01-Q1-E1-E8
ttgcataattagcatcttatcattctttcaacaaataaaccatcagagattgccaattaacacatgataggtgggaaagggaaaataaagcctttgaaacgaacaaaatgccaaaattccatagggtaccaatcaaggtggaagaagcttttgttcattcggtcaagttatcctcttcatcgtcatgctcactcagatcaagatcagccaacaactcctccaagggaacataagattcatgaccatcagctggctagtacactttatttcggtaaaatgctatgttgaacctcatttcatggttttcttccagatcttgaatgaattgttcataatcagatacgacttgatccacagcaactcttcacttagcatcaacctcc

SEQ ID NO: 798 - DNA, 298 bp, Glycine max
  Clone ID: 6HA-01-Q1-E1-E9
gggtcgacccacgcgtccgagaacacatgcgcattggagcacatgttaccacatcctgaagaatgtcatcaaggagaaatatgggaaagatgccaccaatgtgggggatgaatgcgggtttgctcccaacatcctggataataaagaaggcctggagctgctgaacactgctattgggaaatctggctacactgataatgtggtcatcggcatggacgtaacggactccgagttcttcatgtctgggaagtatgacctgtacttcaagtctccctatgtccacagctagtacatctcg

SEQ ID NO: 799 - DNA, 361 bp, Glycine max
  unsure (1)..(361): unsure at all n locations
  Clone ID: 6HA-01-Q1-E1-F1
taatccacaacagctattgtctcatctgatatcaaacatcgggtcaaaaaatgccttctcacaactatgacccagttccatgtccatatgtccatcttgtatggatgttaactgaacatatattacaacacactctccctaatggaaagatgatatttacaaagacccagttaaaatgtgtcaggagacaaatgactgtacatatacacaaattagagatgctaataggtgaaagagggaacggggggcaaaatggttggatccatggcaagttttcactatgtacagattatatacaaaatttactgctcccttgagattttacaganagggcaccaccctacgtagttttggcacaaat

SEQ ID NO: 800 - DNA, 436 bp, Glycine max
  unsure (1)..(436): unsure at all n locations
  Clone ID: 6HA-01-Q1-E1-F10
gggtcgacccacgcgtccgaccatctgggaagaggtataagtttgtggccaccgggcatgggaagtatgagaaggtgcttgtggaagggggcccggctccctaggcgtcccatctcgcttcctgggtctgcaggtccagccggctggcaccctccatgtacccaggggagattccagccagacacccgccccccggccctggctaagaagttgcttcctgttgccagcatgacctaccctcgcctctttgatgccatccgctgccacctccttttgctcctggaccctttagcctctctgcccttccactctctgaccaccgcccccgccctccccacccagctccgcttcttgttacttgggggaggaaagaaactcctgatcattggccaaatggacttacccctggagaggccaagtgccttccangaagtta

SEQ ID NO: 801 - DNA, 129 bp, Glycine max
  Clone ID: 6HA-01-Q1-E1-F11
gggtcgagccacgcgtccaaacatacatgctgatccttgtcttaattttgcagttgtactctccctcctcaattgacaatcaatattaagtgcctatttattgagactattctgggtactggggacagt

SEQ ID NO: 802 - DNA, 370 bp, Glycine max
  Clone ID: 6HA-01-Q1-E1-F12
ggtcgacccacgcgtccgaacctaagtcgcggcgacatggccaaacgtaccaagaaagtcgggatcgtcggtaaatacgggacccgctatggggcctccctccggaaaatggtgaagaaaattgaaatcagccagcacgccaagtacacttgctctttctgtggcaaaaccaagatgaagagacgagctgtggggatctggcactgtggttcctgcatgaagacagtggctggaggtgcctggacgtacaataccacttccgctgtcacggtaaagtccgccatcagaagactgaacgagttgacagaccagtagacgctcctctactctttgagacatcactggcctataataaatgggttaatttatg

SEQ ID NO: 803 - DNA, 394 bp, Glycine max
  Clone ID: 6HA-01-Q1-E1-F2
agaattagtataacctgtttgctttttccttctttcaaattttgatgcagtcccctttttttccagaataaaaacaaaagtgatctgaatgaagaaatctaacgcattaaaatttacattccataaggggactcgagacaaagggtaaaaaaaatcaattacaggtaaaaaaaaaaatggggcttgtttgtgtcaaaaacaagcagtcaaagtatccatatctaccatagcacttggccttcctgctctctatctctccacttcatcagtttgtgtccaaaatcactgaaaagaaatacagtaaccccctttgaaaggaattgagagccgctttgtctactgagtactggcatgtacaatgaacactttccagttccaaataccaaaaagaaga

SEQ ID NO: 804 - DNA, 400 bp, Glycine max
  Clone ID: 6HA-01-Q1-E1-F3
gcaaatgaactacataaatttatgagacttgtttgtcttaactcttgtacaatagttatcttaaatgtcaagtgctagatcagatcattgcattgagtattgactatccaaacaagaaacaaaaatgcttcactattttctcagacaaatcttctctctggtagcaacaaagtttgtaagattttccctacaagattggggttgaagaccacaaaaatcataggagagggacttgaccactgcctttgaaatcaagctggaaccctgatgcttgctatgaccttaaacaagcaaaacggcatttatacaaccatcattttctgggttatttgtgacctgagcgtatttaccccacacaactttcccagcaggtgtgacaagaccaagttcactgacattc

SEQ ID NO: 805 - DNA, 390 bp, Glycine max
  Clone ID: 6HA-01-Q1-E1-F4
tttgcattcaagaccatttcatattttacaaagtaacaatgttcattgttattttcactatacaatctagactgtctcaaactaataagtcagcttgttctaggcatctagatacaaagaccatcgaaatggttgtgccacaaattgatcattcaaaataatgaagattaccaaggctagcgttgctcctagggaaatggataaaaatcatcaataaataagtcatctcctacagaagttgataatgatgcctcgtcactcgtacccgcaagttcagccttagcttgacgatatttctcaagcatgcgatgatattgctcacgagcatctggtgagtcgaccatggacagcacccttgaaacagcctcttcaatttctacatcaactttc

SEQ ID NO: 806 - DNA, 317 bp, Glycine max
  Clone ID: 6HA-01-Q1-E1-F5
ttttaaagaagtgcattcgatccaagttcaactaaatgacattccacatttgatgacgcatctggtaaatgacacatcagattctcgaaccaactaattccccacggaacctgcaccttggctgatgcagaaattactcaaatggggcatcacactggcaacaccgacgattgctcaaactaccctacaaccatggggcatgtggccgcaaaaagtatgtgagatgaatgtgaacactgcgtgtgacatcacacaggttaccagtagccagacaagaatttaagaaagccaaagtgtcttcatccccgcatcacttt

SEQ ID NO: 807 - DNA, 395 bp, Glycine max
  Clone ID: 6HA-01-Q1-E1-F6
ttgaaaggggaagcatatcaataatcaaattataatccatctgacaaataaacaaaataatcttaataggtctaagtaactattccaaactcagctgaagatcaaatacttaatgccgaaactaagcattttggcacactaatacatcttttgctctattttttctaaactgtcttagctttaggggtcatcttcctgagctgactcctgggaattgagttcttcattccaataaagaatagcaatgccccaaaaagtgctgtgttcagcaagaaatcattcagcagctgattgtacttaggcttgccggggctatggttatagaaatcgtacagaagtggagtagtaatcgccagatgcaaaagcagtacgaaagatccaaatgtgcttccaaa

SEQ ID NO: 808 - DNA, 390 bp, Glycine max
  Clone ID: 6HA-01-Q1-E1-F7
ttgtgtaaaattgaatttatttcgtacacgaactacagttgtcaccgtcgttcgcctaaatagaatgtcggagtagttctataatgcgccttgcacattagggggtgaggattgaaatgaaaaatcaacataagggagcatgaatgtaccacccatgcaaggtgcattgtagaattagtttagaatgtcatttaggagatctttcacatagttacccactctgttcaagtttttggcaacaccagatgccaccaggcctgcatttctttgaaacctgttcaagaactctgtcgtatgatttggaggtatatatcttctaggttgaggagcagcatgttcatcttcagttttatgagtagcaggaacatggcctgcatgtgaatttgaagc

SEQ ID NO: 809 - DNA, 368 bp, Glycine max
  Clone ID: 6HA-01-Q1-E1-F8
ttttaatgcttcgcatatctaggcattaattattaaccaagctggaattgatccaactcattcatttacagtaccagtaacagtatgacggtgtgacttggtgattatgcatgaaccgaaccattcaacaacgggaacaatatagatatttacacgaattttgaattgcacatgttaatcgtattggtaatagaaaaatcattcttataggcaacctgcccgtggatcattgtccaattgccgtaaggaaacggtatactaaaatttgtatgatggaaatttatggggcactaaagggaattcagggaccctgtgcgaagggttccaaggtgtcttgaggggtacattctgaatcatctgcaagtttc

SEQ ID NO: 810 - DNA, 440 bp, Glycine max
  Clone ID: 6HA-01-Q1-E1-F9
gggtcgacccacgcgtccgagagaagtggcattggttttcattttgaagatctctttaatagacttttttgttttggaaaatttgtttttccacgaaagtattatttctgttaccatataatgggttattctttttaaataaattttccaaaacaaaaaagtctattagagaagtggcattggttttcattttgaagatctctttaatgtcttggcttaatcacagagctggattcgtttatgtgcttctgcattcagtctgtcgcactattacaggtcacagaacgctggaaactgcagtgtccactcctgaaagaatgaatgaaaaagctaaataaagtcttaatattgttatgaaaaatctttatgaccttgtggaccccgcgaaagggtctcaagaactgcactaggggttctcagaccccacttagaaccattac

SEQ ID NO: 811 - DNA, 392 bp, Glycine max
  Clone ID: 6HA-01-Q1-E1-G1
cacttgaaatattgtaaccaagatttattgatttatggaactatgactgacataaagcattctattaattaatgtcatcacccgcttgaaccagatgccacatgggatgagctatgaatgcaagcatttatccacataatgacacatggtttaatttccaagcaagtattaggcacattttcttgaaagcagcactcacctgaaatattcaacacctaccttaccagcaagcaattgggagattatccacttgcctctctttgcttccagtttaagaaaccagccaactgaaataattaaaccctcagcccacaattcatagtacataaaacgttcaatgtccaagctctcagtatggacgagaacgattttcataatgatcacgcctatca

SEQ ID NO: 812 - DNA, 438 bp, Glycine max
  Clone ID: 6HA-01-Q1-E1-G10
gggtcgacgcacgcgtccgatatttataacccaaatattcatcaactggatgaatggataagtaaattgtggtatactcctattactcagttattaaaaagaataaggaagacttatgtaagattgcccaagatttgatgttcagtgaaaacaagaaaatcagagaataatgcataatcatattctaaaataaaaaatgtacatatttatgtggtgtagaggttatagaaaaagagaactgtgattgtagtggggcaagttatagcaaatgggtttgtgggcaccttatctataccataattcaatgcaaacataaatgttcttaaaatgctggcatgtcttcataacctaaagactctggggtactatttctaaatgtatgtctagtaatgctgaaattaagagtgctgaatttaaaagcagtgccttttatagata

SEQ ID NO: 813 - DNA, 439 bp, Glycine max
  Clone ID: 6HA-01-Q1-E1-G11
gggtcgagcacgcgtccggaacaatgccctttttctttctaatacagaaatgaaagagtaaaagaaataggaggagaagagattatgtccaagcagtctaaggaaaggagtagcaaattcaaactcttcacaagctttgatgttgatgatgtttattctctaagcaagataatacgtgttaaagtctttcccagtgctggcttatactgagcgctgaaaaacaacctgtttgaatttaaatctcttaacaattctttgtcttgcaccagtattaataaataaatatttctgaagaggcaaatatttctgtttaaaacaactgacatacacttaaaagtgtgtctcccttctgaaaaaaatgtttgtttaaaaagaaaatatgtcaatgcctgtttctactaaattaaagaaaataaatagtaggaaaaaaatgtttcag

SEQ ID NO: 814 - DNA, 434 bp, Glycine max
  Clone ID: 6HA-01-Q1-E1-G12
gcgtccgaatattcagaagtgatgagaacagtataatgaattatatgtactcatcactcggcttcaacagtgatcactacgtgactaatcttgttttatctgtatgcttacatccttctcacccttccccttccctattattttgaagtactagtcactcagaatttcagctataaatacttcaggttgtgtctttaacagacttaaaaaccaagcaagcaaaatgtcattattacacctaataaagctaacggtcatgttttcatattatctaattaatacctagagttcaaataaaatgcctagtatttttggggctgaagatacaacccataaaagtaaagccttggtgttataatacccaagagccaatattctaacgtgaggaaacagacaaatgttagtaaaatacgaacacgataatttctgctaac

SEQ ID NO: 815 - DNA, 378 bp, Glycine max
  Clone ID: 6HA-01-Q1-E1-G2
tttttaacacacccatcacaagtccaaaacacttgaacttgctcaagggcaataaatgaccactttactctaagggtgtttgtttagacacagtacaccaaagtgcaacataatacatactacataattttgaagttttgaaactacatatattttttatcattatttcaaagggccatttctgcttgaagctttagctctccaacacctcacttgcaactgcacgggttgcacgtgcaattagctccacatttgcagccatcgttctcaacgcgaacacccatttcagcactctcgaattgagccttaactggtgccactcccatgaccaatgtctcggtcgaggttgactcagtgtaccacaactctgggtacatc

SEQ ID NO: 816 - DNA, 343 bp, Glycine max
  Clone ID: 6HA-01-Q1-E1-G3
ttttattcgtggtcatcattgacaacttgacattaccatgtagtcaccagacgaaccacaaaaagaagaaacaagaagcttcccctcttaagttacaaaaagaatgcatgttacgaaagtatgagtcagttcacaatatgattaaccaccagacccacaacttcccctaatgttttctacttccaaaatgttatccacccaaagaaaagaaatagcaaaagtaaaaagaaaaaccaacatctgctgaattgatctactttaactttcctcataattgcttgaatagtcaggaacacagaaactaagatcgagaactatggtgaaagattgaatcgcaaaaatg

SEQ ID NO: 817 - DNA, 331 bp, Glycine max
  Clone ID: 6HA-01-Q1-E1-G4
aagccataattcaagtcatatattaaaccagagcatacctcaatctcgaagtttaaacgtacaaaattcaagcaataattcgaatgaaaatagatctaaaacaataggatagggtgctataacccctttagcaccgacgaactaccataaatatcaagaaaaatattgcttttgttcgaatttggaggcaagccaaaaaaaagagaccatctagcgcaatcttcatgcttccctttcagactcgagtagggtgagaatgtctccttctctcacaggtcctttcacattcctcatgatgtgacggttctgatcatccaaaaacttcaatcta

SEQ ID NO: 818 - DNA, 354 bp, Glycine max
  Clone ID: 6HA-01-Q1-E1-G5
tataatagaagaaatcacattcatacatatattgaataacacttatgttcaaaaaaatggattcaaatcaaagcaagtggcaccaaatgtagatacataaatataatctaaattaaatattcaatatgaagagtgccatcagaagagcaccagcacaccaaaagttgccaagacaaggttggcccagattccatagctgatgaacttgtgagaagaggagtcatcatgagtagatgatggagatgatgctttgctatctgcactgtgttcagttggagaatcagcagcaggggcaatatcaggagttggtgcaggagcaggtgcaggaggtatattactgccaataatggcctc

SEQ ID NO: 819 - DNA, 391 bp, Glycine max
  Clone ID: 6HA-01-Q1-E1-G6
actcatatcctaaaatcatttatattttttaatccttgactagtgccttcaaagcacatgttagtatttacctatcttattttcaaggtagtaataatagattttcattttcagacattcaaaagataagctacggcagaacatagtttttctgcaaaatattcatagcttaccgatgtaagactacgaacatgccccaaatataggaattctctcttcaattggaacccggcagcatggacaaacagctttaccctttttcccatactctttaccgcatcgagcacacataacttggtgtgcacatggcaagaaaataactgaaacttcatcctttccacatataatgcattctctatcaccgttgatttcttttccagaaaaatccttc

SEQ ID NO: 820 - DNA, 392 bp, Glycine max
  unsure (1)..(392): unsure at all n locations
  Clone ID: 6HA-01-Q1-E1-G7
tagcatctcaaaagttaatagataacagaattatttattgtaagtatatcaatacaatctcaaatgagaaagagagaggttatatacgtaattaacaaacataatgaacataatgagcaagaggtcggactcggagctaaacaaatcgacaaaacttaaattcctaatatagttcttatctgattaggtggatgccttgccaacgacctggggtccggataaccattcttgggatccataatagccttataaataaggtcataagcttcggccagtgacctggccacgccaatagtagcttcagaacgcaaccttggaacctgcatctgctcaaattccggcatggaactttcacttcccaagataaggccanacagagctttcaaacactc

SEQ ID NO: 821 - DNA, 376 bp, Glycine max
  Clone ID: 6HA-01-Q1-E1-G8
cctgttaaagcatttttgttaacttcgtaattgttcacaaatcacaattgttaaaattcctccgacacatcgatatttaacaaatctcccaaaacactcaacagcatcctgtttaaattccatttagcacaaatgattcgccatctcaatatctgccagggtttgtaatgcaacaccatcaatcttgaccgtaaatcaatagtccctagaaaacttcaacatcgctacctcaaaggcactcattaaatgatcaagttccctgtccagatcattaatagactggttatatgcctgcattggcgaagactgactagtggtgtgtatcctgaccataattttgtattgaacatggtgaggaagcttgtatccggcaatc

SEQ ID NO: 822 - DNA, 374 bp, Glycine max
  Clone ID: 6HA-01-Q1-E1-H1
aacaccaaggaacatgaatgtattcttccactctgagacaaattacaataattagtagataggcttaattcttcctgagatcaattccagccttctttgcaactgcatcaggtccattcttctctatcgtcttcaatgccttaattgacaaacgaagctttacgtagcgcttccctgcttcccaccaaattcgcttgtactgaaggttcacaaactgcagtttctttgtcatgtggtttgaaaatgatactttgttggacctgtttgagttctttccagtgaagggacacactctcttggcaacgatagggaagggtgtggggaacggagacgcagttacgggtgtgggtggcaatttggggaaacagattctg

SEQ ID NO: 823 - DNA, 424 bp, Glycine max
  Clone ID: 6HA-01-Q1-E1-H10
ggtgaacttgcgacagggtctggctgcacattggaatcacctgagaagctttaaaatactcatgcctggatcccatccctagagactggggtacagcctagttattgggaatttctttaaaagagttcctgggattctgataagaagccaggttgagaaccactacattagaagactgaatggtttaatttacatcctatgttatgattggtctaagggataagatttggggtctaacctttcctttcactctagttagtcatagtccttgacttatgcctatatctttgtaagaaatagtatgtttcatttgtgatagtattggtagggctgaatatggatggcatctactgttaaacaagtctaccttgtcagatgtgcaaaagctttcactcttgttctcaaataaaactttgtgggtttt

SEQ ID NO: 824 - DNA, 434 bp, Glycine max
  Clone ID: 6HA-01-Q1-E1-H11
cacgcgtccgagattctacattttacatcaccagtgatgcctcctcatggtttaaccatttcttccacattctgcctaaagggaaaactgtgtcagcaattgcttttggtttttaaagttataggttgctactacatggatgtgactaagaaaatacatagattatcttaaaatgggcatgatgtaaaagactcaatcagtagggtaactaaaaactttgtagtactctagctttggaaatctgagaggcctatatagttcatttgagtgtttgatcaaattcttattgagattacagcctgtgcaaaatatttgtgatgcatttttaagtttacttaagtacactttgaaattctttaaaaattttaaaatctttaaaaggacacaagagtgtaccacattgagattaaaatgtgtttattattaatttgtac

SEQ ID NO: 825 - DNA, 378 bp, Glycine max
  Clone ID: 6HA-01-Q1-E1-H12
aaaccaaacacaccctaatatattgcttttacttctcacaatttttgcaacaaaaccactattgaaagagaccaaacatgaacaatgaaaggaagagtaacagactgatcagccgcttgaaaatggctaaaatcaaaataaacaagaaaacttaaattttgttgaatgcaacaatgtcacagctctggatatactcgttgcatggctcaactgtcaagcgttcctcaacaagggtgtccacggatacaaggtcatcaacaatagtcatcatgatctgcaacttcttgatcccatatcccacaggaaccagtttggatgctccccacaataaaccaggcatctcaatactgcggacagtctcttccagcttcttcatgt

SEQ ID NO: 826 - DNA, 326 bp, Glycine max
  Clone ID: 6HA-01-Q1-E1-H2
aggcaatagttatcaattcctttaagatcaacttaccattatgacagcatggttctaggctgaacatatcacccatccaaatatctatgatctgcctaaagtacagcaagttcaatcaatccacacagctaatctctgtctgtaaccacttggcatttacaactgtaacctcattaaaaaccgtatgtaaaactcaaccacgagtgaaaacaaaggattaacacagttttcgggatatttcaacaatcacatactctttttaatagcaaaattcaaggggccctggccaatggactttaactgactcctaacactcagattgtctt

SEQ ID NO: 827 - DNA, 299 bp, Glycine max
  Clone ID: 6HA-01-Q1-E1-H3
aagtaacaaagcacaacctaagaaatattttaagaatcgggaatgaaattccaaaagtaacaaaccacagcatccctgactaaaagataaccccaaattcgcccaaaatggatgggaaaaagaagaaatggacacccaataaattcaaacgaaaggatctaagggggaaaatgaatcaaggaccatgaaaaattgcacgaaactgaaacccacttttccatcaggcgcaccataggacctcaaaaacacccaacagccacatgacactccgaaaaaataaccaattacggcggcttgca

SEQ ID NO: 828 - DNA, 398 bp, Glycine max
  unsure (1)..(398): unsure at all n locations
  Clone ID: 6HA-01-Q1-E1-H4
ttcaattgtaatactttgattaaatttttattcaaaaaggatatctcacgatcaactttgttgctcttttcatcaaaatactagtaacaccaaggataggaagatttgagctctttcatcaaaatactagtatacatgtatttttgtcttcaactctatttacaactaactagtagaagttcctttggagggaagtgtttaatcaatttcggcatgcacgtaatccacgaattcaaaattcttttggagttgatttagggcaaaagttatggctgcactgacaattgcgagtccagccaaaagtacacgcaactggacatctgatgggatccctgatgttgcacaaaacacaactgttgtaccaattangactttctgccatgtttggaatccctcat

SEQ ID NO: 829 - DNA, 375 bp, Glycine max
  Clone ID: 6HA-01-Q1-E1-H5
aactaaaaagctgttatgaccattacagtcaaccatgaaggtttcagtagttaaattccctcaatccttcgatcctagtaaaaattccagtagacaaggccaaactaaagctttctttcaacaaaaatctaaatgcaaatgtgtaacaaaagggggagaaaaacaaaccaatccccgtagaattctacagtatttggtatctactgtaagattttctcaaattgtttagagaaagccaaatcaattagttttcgtctcttcatccgttgtactgttcgcttcatcctttgtggcgtctgtctctgccacaacctgatcatcctcgcctccaaaaccaaattcattaacacgtttcttgtcgactttaaaaatcca

SEQ ID NO: 830 - DNA, 332 bp, Glycine max
  Clone ID: 6HA-01-Q1-E1-H6
aaagaaaaaaataaatagaaagtattattccacgtggtcatccaagagttggccacattcaacataagtatcttgaacataattacatgtcctctataggactagttttcttagttcttaaaaaaatgaaaaaaaaacaaataactaggagctagaaatatagcattttaaccgagtgatttcagagatggtcatatcccacggtaaagctaaactacgagagaatcataagatttaagccaacatacaattagaaacaaacacagaaaagaaatgacttataaattaacttttggcacctagtcctcgcgactttggtagcctaacagcac

SEQ ID NO: 831 - DNA, 397 bp, Glycine max
  Clone ID: 6HA-01-Q1-E1-H7
tttttagtcatctcaaccaattttattgcactaataataagaaccataaccttaaaagtagattctagggtacataggaagtagtttaactttaacaaaaccttttattttttggaacaacaacacaaggttaccctaccaaaccaaaccaaaccaaaccaaatcctaagtaaaatttgggcatgtcatgggtgtccagcaactcctctaggctctagtggaggtgatcggagcaacctatgccgaagctccaccgggtcaatttcaggggtgtggttaatgggcctatagtaacctgttactgggtctggggcccaatcagttgagtaggcttttgaaccatctcttgtatcaggcttctcttctacacgctccacgattccattccttcgcccaa

SEQ ID NO: 832 - DNA, 371 bp, Glycine max
  Clone ID: 6HA-01-Q1-E1-H8
caggaacggacctagccatgttttattgagcacgtaccaccacggaacagaagaaagcggcatgggacgtctgttttatgtcgcaaagcaacaaacacaatttagttacatatttttctcaaaccacaaaaatccacaccgagggaaatttacaagccactaaagggtcatgaactgcccaacctgtgacggcatttggaagtaaaagtgacactacgcaggtttcacaggttccgtttctcgctgtagaggctccaggtccacaaacgtaaagggggcggttgggtccacaccgggtttggaacgcatgcactgccagcacatcttgaaaggtcctggaccagtcctgacagggttcccctcaatccaag

SEQ ID NO: 833 - DNA, 424 bp, Glycine max
  Clone ID: 6HA-01-Q1-E1-H9
ccacgcgtccggtcctagaaaccacgaccaattgagcagttcctccgaggcaccagggactccaacccatgccatggcggattctgagcgcctctcggctcctggctgctgggccgcctgcaccagcttctcgcgcactcgaaagggaatcctcctgtttgctgagattatattatgcctggtgatcctgatctgcttcagtgcctcgacaccaggctagtcctccctgtcagtgattgagatgatccttgctgctaatttcattgttgtctacatgtgtgacctgcacaccaacatagcattcatcaactggccctggagtgatttcttccgaaccctcagagcggcaatcctctacctgatcatctccattgttgtccttgttgagagaggaaacactccaaaatcgtctcatgggtactgg

SEQ ID NO: 834 - DNA, 383 bp, Glycine max
  unsure (1)..(383): unsure at all n locations
  Clone ID: 6HA-02-Q1-B1-A1
gttcagattcttattcagagcaaaatttggggcagcaaggaactaaatcctctatcagcattagtttacctctgcgttctgtctctggtgcaatccagtatagattgttgggtcagttatggcagcgttgatttccaaaagaatcctacgttgttcttcttggtcattgcattcactaggacgatgttactttgattcacctagtgctgggtttgcctctatttataaaccacgtgatgtatgcaacagtttatctggggagagaatgtttcctgcagatcgttctttggtcaggtctatggtccgacagttttctacttctattttaactcctggagctgatgatagtgcatttccatctgatttantgtccaaaaagactc

SEQ ID NO: 835 - DNA, 323 bp, Glycine max
  Clone ID: 6HA-02-Q1-B1-A10
ccttgactccgctctgccatggctgacaaaataccgacgcggaaacacgcccgtcttcacgatcctgcgatccagcgcggcgtgtccagcgattccgctcaccgacgagtctgcgcaggctcaagagtcgcgaagccagccgcctgtgaagaatctcgcgattcgtctaggaatcgcgattcaagcacgagtcatctccgataaacatattcaaacgcgattcaggaacaactgcgagacaacgtccgaatcgtatcggtagcagctggaatcgtatcgaatcgtgcgatacgtatcgtgaatattgaaaatgaagtttcctg

SEQ ID NO: 836 - DNA, 369 bp, Glycine max
  unsure (1)..(369): unsure at all n locations
  Clone ID: 6HA-02-Q1-B1-A11
attgaaacttgagagagagaaagtgaatgaatgatggacgcaaacggtgtgcagttcttagcgtaccaatcaatattttcgagcgttggatctggggactttgatggggtgaagaaactggtggagaaagtgaagaatgaagaatggtcatcgctctctgatgtgatgtctcttcagaacgatgctggagagactgcgctatacatcgctgcagagaacaatctgcaagagattttcagcttcttgctcagcatgtgtgacttcgaggtcgtcaagattcgctccaagaaggctgatatgaacgcctttcacgttgctgccaagcgtggcaatctaggattgtanatagctgcagagtgacatgtcatc

SEQ ID NO: 837 - DNA, 332 bp, Glycine max
  unsure (1)..(332): unsure at all n locations
  Clone ID: 6HA-02-Q1-B1-A12
aacactgcgacacatactcgctgctgattgttctctctttctctcgctcacacatggcttgtttacagcctccatggttctcttcattgcgcgtcgtgtccccggcaaaactcgcagcaggcccgccgccttcaacaacgtacaagcccgccaagctgctcttttgggccgtgggcccagacaatgctgaatcttctgagcccgcctcccccgacgctccagagcccgccgcacccgttgatcncgtggagttggcgtttagcaaggccaacgcgtataaagctgattataataatgatgaaaattcggctgaagagagaaacgttggtgat

SEQ ID NO: 838 - DNA, 414 bp, Glycine max
  unsure (1)..(414): unsure at all n locations
  Clone ID: 6HA-02-Q1-B1-A2
ctcagcctctcaccaagggtactcgcactcttccaatttctctctcatccattttattactatttgtgctgtttcactctgaacatatcgaagacttgcaggcgctctattacagcctgtgagttcaaaacatgtgcgaaatcgcataccatcctcttttcagttcagatcctcatgatgtgcatgtcntgagggttctttttgcagaatgatgaacattctcaataatgatctatttgcattgtttcgggcgtttaccttttttttatatctagtttgtaaagggaatcatttgtgcaagtgaaacttgttttctcatttgaggattttgtctagtatacctgctgtgcttatggacggtcttgtactgactcgttatgtcatcagcacatnncatanacctaagctacatct

SEQ ID NO: 839 - DNA, 322 bp, Glycine max
  Clone ID: 6HA-02-Q1-B1-A3
ctcgctctctgccttccatcaccctcgccatttcccttcccaagatagtagaagatggcagacgctgaggatattcaacctcttgtttgtgacaatggaacaggaatggttaaggctggttttgctggagatgatgccccacgtgctgtgtttcccagcattgtaggtcgtcctcgtcacactggtgtgatggttggcatgggccaaaaagatgcatatgttggtgatgaggcacagtctaagaggggtattttgactctcaagtaccccattgaacacggaattgtgagcaattgggatgatatggaaaagatttggcatc

SEQ ID NO: 840 - DNA, 323 bp, Glycine max
  unsure (1)..(323): unsure at all n locations
  Clone ID: 6HA-02-Q1-B1-A4
ctccgagttaccgctctccctgcaacgtttcagaaacgggaattctttattattgcctttgaaccatggtagcggcaccaacgcaaaattctccatggaggcgtgacggtacacgtaattatcctccgctgcgcgaagaaattctttgcaacatagtttaatcatgcagtggtcaaatacggagcgagtggccaccttggcaaaaatctccacttgcaactccttaggaagaaatttgatggcggtgacagacacagacccatgcttcctcntgttgcttcctttccttttccttaactcttaaatcaaccatcgatctaaca

SEQ ID NO: 841 - DNA, 262 bp, Glycine max
  Clone ID: 6HA-02-Q1-B1-A5
ccttcctcaagtcaatgatcacatcaaaaaattacaagagagatttaatggaagaaaggtaatgttaggtgttgatcgccttgatatgattaaaggaatccctcaaaaaattctagcatttgaaaaatttttggaagaaaatcctggttggcattataaaattgttctgcttcaaattgccgtgccgacaagaacaaatgttcctgagtatcaaaagcttactaaccaggtccatgaaattgtttggcgcatcaaatggaaa

SEQ ID NO: 842 - DNA, 368 bp, Glycine max
  Clone ID: 6HA-02-Q1-B1-A6
ctgagcctcactctcagtctcactctcgtgaaaagtgaaccaagtccccacccatggaagcctggttcataatcctagtcactctttgtgtctgcgtgctgataagagccatactattctctcttcacaagaaaaccataaccatccctccaggccctcctcacatcccaatcatctcaagcattctatggctccgaaaatccatatctgaactcgaagcagttgtgaaaacactccacgccaaatatggccccatcatcactctccgcattggcactgagcccaccatattcattgccgattactccctcgctcaccaagccctaatccaacacggttccctcatcgccatacgccctaacgatggc

SEQ ID NO: 843 - DNA, 342 bp, Glycine max
  Clone ID: 6HA-02-Q1-B1-A7
cgcgtcgttaatggcgccattgccttggtgtttgtcgtcgttgcattggaggtcagggtcgtcttccattcctttgctaggtacattcaggtccctccgcccctcaattttgttcttgtcactatcaccatgcttggaggggcttctgccaccgccgcttatgccatgggtatggtttctgatgccctcagctctgttgctttcactacttccgctattgtggtcagtgctgctggagcactagttgtgggctttcccttactttctgccaaaagatgtctaatgctggtaatggcaactggtctactttttaatttaatgcaagcaactcctcctgtgtca

SEQ ID NO: 844 - DNA, 415 bp, Glycine max
  unsure (1)..(415): unsure at all n locations
  Clone ID: 6HA-02-Q1-B1-A8
gaagaagaagaaatggaggaggaggaacttgaagctggtattcagtctgttgatagtttgtctagcactcccactggagtggagacacctgatgttattgaccttcgtaagcagcagaggaaggaacctgaaaagcctctttatcaagtacttgaagagaaggaggaaaaaattgctccaggaactttgcttggaactacacacacttatgtggttaacactggcacccaggacaagtcaggggctaaaagggttgatttacttagaggacaaaagtcagataaagtggatgtcactttactgccagaagagttggatgccatgggaaatgttttaaccgcgaagtatgaagaagcaagggaagaagagagttacganatcagcgtgaggatttcagtgacatggtggcagagaa

SEQ ID NO: 845 - DNA, 343 bp, Glycine max
  Clone ID: 6HA-02-Q1-B1-A9
gccaaacattggttatggttcagacaagaagacccgccactatctccctaatggttttaagaaatttgttgttcacaatgtgaaggacttggaactgctcatgatgcacaacaggacttactgtgctgagattgcccacaatatatccacaagaaagaggaaagatatagttgagagagccgcgcagcttgatgttgttgtgacaaacaaaacagccagattacgcagccaggaagatgaatagtctaaatgactaaaaaagtcacttatctgtagtgattcagtagttcaatatcaaatttgcaatttaattttaaattgaattccgcttcaatgtactttg

SEQ ID NO: 846 - DNA, 396 bp, Glycine max
  unsure (1)..(396): unsure at all n locations
  Clone ID: 6HA-02-Q1-B1-B1
nagaactactcatcactcactccaaacccaacaaaacaccattattcatatcccaattcccaaactttcactattccctctcattcactctctagctagtttcctcatcatcgtagaagaaccaatacttgtactctctcttactttttaaccatgtagaatgattcacctaaggaaaaattagtagcttcttgttgtgctttttattttgttttgttttgtgtagagataaatctgtttggtattgttttgtgttttatgaattatttgatgggtgaagagggagaagaagtggtgagaaagcaaggacaaaagggtgttgatggagataaatggtacttgtatagctgcttacaagactgtaaatattggtgctgttaattaatacacgagact

SEQ ID NO: 847 - DNA, 286 bp, Glycine max
  Clone ID: 6HA-02-Q1-B1-B10
gtctattctcattttctctctctgtctctttgccccatttcagtgctctgtcttctcccccaccaccgcactctctcagatattatcatttcatatcacacattcacatcctatcatcatcgacaacacgctatccccattgcttcttctcttctccctctctcgtttcctacttgacggcgccgtttcgttctccagaagatgcatctgagtacttcgcgctgcaactagacatgatgagttcaagtttcaagacatgggctgtgggatttgcacttggaaatga

SEQ ID NO: 848 - DNA, 329 bp, Glycine max
  Clone ID: 6HA-02-Q1-B1-B11
ctgattaactctttcttctcataactctgccgccgcaacagccccaaatccaatggcttcagagaagaaactttcgaacccaatgagggagataaaggtgcagaagctcgtcctcaatatctccgttggcgagagtggagatcgtctcaccagagccgctaaggttttggaacagcttagtggccaaacccctgtgttttccaaagcaaggtacacggttcgttcctttgggattagaagaaatgagaagattgcatgctatgtcactgtcagaggtgacaaggcgatgcaacttttggagagtggtttgaaggtgaaggaatatgaac

SEQ ID NO: 849 - DNA, 295 bp, Glycine max
  Clone ID: 6HA-02-Q1-B1-B12
ttaccaaaattgaataaattatatactataattaaaccataacatacaggcattacaaattactaaacaaactattaaacatgcctcgtctattttctcttctagactcctaagcctaaggcacgtctttaaataagccaagcataacatgattttcatctaatattcactgtaacacctgagtcgccttgacatgagtctgcataacttctcattagacagttcaaatccatttataatacaattgtttgatgcatctccacatatcttttcctcaggcaacccaatatccttt

SEQ ID NO: 850 - DNA, 388 bp, Glycine max
  Clone ID: 6HA-02-Q1-B1-B2
gtttctcaacaatgtttttctcacacagagagaacacagtgagtggtcttgggagattggtgctaatcatatggctttttgtggtgttaattatcaattcaagctacacagctagtttaacatccatcctcacagtgcagcaactgtcatcacaaattgaaggcattgacagcttgatatcaggtactcaaccaattggaattcaagaagggtcatttgcacgcaagtatttgacagatgaactcaatatacaaccatcaaggatagttacgttgagaaatatggaggcatatattgatgccctcgagaaaaggacaaaagatggaagggttgtggccgttgttgatgagcttccttatattgaaatattaatgtcaagtaccaactg

SEQ ID NO: 851 - DNA, 296 bp, Glycine max
  Clone ID: 6HA-02-Q1-B1-B3
gatgttataaatgcctttgcctctgaagctttgagaactatttgtttggccttcaaagagataaatgaaacccatgaacccaacagcattcctgatagtggctatactctaatagccttagtaggaatcaaggatcctgtacgccctggggttaaggaagctgttcaaacttgtatggctgctggaataactatccgcatggttactggtgataacataaatacagctaaagctatagctaaagaatgtggtttacttaccgagggtggtctagccatagaaggtccagatttccg

SEQ ID NO: 852 - DNA, 419 bp, Glycine max
  Clone ID: 6HA-02-Q1-B1-B4
aagaaatggaccagcaagaatagtggttctgctacctgcaagcgtgggtttgttcagttctgttatgagcccatcaagcagattattaacacttgtatgaatgatcagaaggataagctgtggcctatgctgcaaaagcttggggtcaccatgaaatctgaggagaaggacctcatgggtaaagcattgatgaagcgtgtcatgcaaacctggcttccagcaagtagtgctctatttggaatgatgatatttcatctaccctctccatcaacaagccagaagtaacgtgtggagaacttgtatgagggtcctcttgatgatcaatatgcttctgctatcagaaattgtgattcctgaagtcctctgatgctctatgtctccaagatgattccagcatctgataaggggagattttttgc

SEQ ID NO: 853 - DNA, 414 bp, Glycine max
  unsure (1)..(414): unsure at all n locations
  Clone ID: 6HA-02-Q1-B1-B5
ggtttttgtaaggcgaaaacagtgagagcggtgtggtgcttagtgctcacaccaattaccaatggcagtggagaagacggagcaagaactccgcaacgagatcgatgagcttcttcgccaacagcgcgagatttcggaaaggcttcgagatcctcgaggtcttcgcagaggtgccttgccgggtcctcctgctctccgcactaacggtgttcgccaacgaccctttattcgccctggagacaagaacgattctgaagatcaacctccttccaagcgtcgactttcatctgccgtcgttaaggtggatgatggggacttgcctgaagatgctgatgcaggacangaagatggaaagacaaaggatttgactaatgaagctgtcaatgggacagctgcactggtccagaatgatag

SEQ ID NO: 854 - DNA, 294 bp, Glycine max
  Clone ID: 6HA-02-Q1-B1-B6
ggtgaaaaagcagaagaggcataggaagattttgacgttttacactgcttgcttcggttttcggaagcctttcaaggttctatgtgatggcacattcgtgcatcaccttcttgtgaatcgaataacccctgctgacacggccattggcaatgttctcagtgctacggtcaagctctacacaacaagatgtgttctagctgagttgaatcgactcggtagctcgtattctgaggctctggaggcagctcataaacttatagttgcaagatgtgagcatgaaaaatgtaagagtgc

SEQ ID NO: 855 - DNA, 217 bp, Glycine max
  Clone ID: 6HA-02-Q1-B1-B7
gccgtgtgcaagtcatggcgctctccaatcagcaacgaatccttcatctccctccagcgccgccactccccttcctttctcctccttggcgtcagcagcaagctcctcctcccccaacgccgccatcaccaatgatcctcgctcagccgctcctaaagcctcctccgccttcactccttccgcgatctcgagttccacgtccattccttctgtaatg

SEQ ID NO: 856 - DNA, 396 bp, Glycine max
  unsure (1)..(396): unsure at all n locations
  Clone ID: 6HA-02-Q1-B1-B8
ctcgagccgattcggctcgagatttccggggcactgaagtgcattgtgttttatgccctcgcaatcctgatgatggtggaagctttgttcaggatttagaaatttccaccatgtttactcatcaccagaaaattgtagtcgtggatggtgaattgccgagtggagattctaataagagaagaattgtgagttttgtggggggtattgatctctgtgatggaagatatgacactcaattccattcacttttcagaaccctggacacagcacatcatgatgactttcatcagcctaactttggtggttcttcaataaaaaaaggtgggtcaagggaaacttggcacgacatccattctccacttgaaggccctattgcttgngatgttttgttcaact

SEQ ID NO: 857 - DNA, 240 bp, Glycine max
  Clone ID: 6HA-02-Q1-B1-B9
gcagaatctacagaggtcattctcgaagctgctcttaagtccgcaacacaaaggggcctttgtaagcctggtgatgcagttgttgccctgcatcgtattggcactgcctctgtcataaagatctgcatagtcaaataatatttcatgctcaactcatgcaaggttattatgttttgacctttttctttctttctttctgctgtttatccatattatcataaaatggaggatttacttact

SEQ ID NO: 858 - DNA, 407 bp, Glycine max
  unsure (1)..(407): unsure at all n locations
  Clone ID: 6HA-02-Q1-B1-C1
gtgtggaggcgctatcatctctgacttcattctcctttttgagacttctaatatcctcagggttttttgggagaattggctaaaaaatggttatatgatccgtgtttgtgctatgatgttatttttattttttctttgtttaatggttctgaatgtctctgttcttactgcgatttttacacttttccaattatattaaagggtctaccacagcgaaatctgtggcattccaagttcgagctgagaaatttgcaaataggaagaggaaaaatcagtatangggaatccgtcaacgcccttggggaaaatgggcagctgagattcgggatcctagaaagggggttcgtgtctggcttggaaccttcaacactgctgaagaagctgcaagagcttatgatgctgaagca

SEQ ID NO: 859 - DNA, 289 bp, Glycine max
  Clone ID: 6HA-02-Q1-B1-C10
gggagactgagttcagtggagtctactgaagacaaaagtgagctgtatgttgtgagtactgaagatccagaaaatgatgacgataggaatgatggctctgatccagctgagggaatgcctggatttcagaatgtcttgaaagatatgattccgggggtaaaggtgaaggttttcaaggtgataactccagacaaagtagacaaggatatatctaatgtgattgagcagataattgaggatgaagacgaagacgaagatggcaaccaagacgaagacgaagacgaagacg

SEQ ID NO: 860 - DNA, 396 bp, Glycine max
  Clone ID: 6HA-02-Q1-B1-C11
actatacacatcactcttgtccgtgagcctgtagaattggggttgtgcgcatggagctgagatcatccatgccagcagttgatgcagccagggaaagagatcaagttaacttggcaagtttttgcactaaaaagattcaaaaaggaaagcttagtgagcttgtagacccatcccttgggtttgagtcagaccaacaagtttaaaggatgctaacttcagtggcaggattgggctttcggtgtgtgctacgagacaatggattaaagccgtctatggatgaagttctggaagcactcacgagaattcaaagtgggaaatatgaatctgagaatctacagaaaggagatgatgttggtggtggtggtgttacctcttccacttcctccaccgaacaag

SEQ ID NO: 861 - DNA, 414 bp, Glycine max
  Clone ID: 6HA-02-Q1-B1-C2
gcaagaatttccattgcatgcaaagcaaatacgcattatattactagttttaatttgttttgtcgtttgcttctttctttgattaatgatgactagctttaaggttgcatgtgtggttgcgatgatgtgcatggttgtggccatgagtgttacacccatggcacaggccgcaatcacgtgcgggcaggtcgccggcgacgtgtctccgtgcctcagttatcttcgaagcggcggaataacgtcggacgcctgctgcaacggagtgaagtcgctcagcggcgcggcgaagatcaccgccgatcgccaagcagcctgcaattgcctgaaaaatcttgccaataatatgggacagagtttgaatgccggcaacgcagcctctctccctggcaaatgtggcgtcaacatcccttacaa

SEQ ID NO: 862 - DNA, 337 bp, Glycine max
  Clone ID: 6HA-02-Q1-B1-C3
gctgaagacaagaaagatgctataacaaagcatcaaactgatggcagcttgaagagcacaaggagtactgaaggatctttgtccaacttagaatctgaagctgttgtaaatgatgaatgtatatctaattctaaaggggacgattcacattctgtgcaaaatcaacatcagagccaaagtctttctaccaaagcaaaaacttttattggcaatgaaatgtttgatgggaagatggtgaatgtggttgatggactgaagttgtatgaagatttatttgatagcactgaaattgcaaatcttgtttcattggtcaatgatctaagggttcctggaaaaa

SEQ ID NO: 863 - DNA, 148 bp, Glycine max
  Clone ID: 6HA-02-Q1-B1-C4
caatcatttaataatccaattggatagctggaaatattaaatggcaactgaagaccccagtgtattgggtcacgatactgatcgagtcagtaatcagcatctgtgctagaagaggcatgtagatctaattcattcggggatgaatcag

SEQ ID NO: 864 - DNA, 332 bp, Glycine max
  unsure (1)..(332): unsure at all n locations
  Clone ID: 6HA-02-Q1-B1-C5
gtagaacgctgctgccgaaacccttcccgatccctaaggtaagtgagtaatcggtggttgagaatggtggagaaggcgaagggtaggaaggaggaggtggttaccagagagtacaccattaacctccacaagcgcctccatggctgcacatttaagaagaaagctcctaaagctattaaggagataaggaaatttgcccaaaaggccatggggaccaatgatgtgagggtggatgtgaagttgaacaagtttgtctggagccagggaatcaggagtgttccaaggaggattanggtaagaattgctcgcaagaggaatgacgatgaagatgc

SEQ ID NO: 865 - DNA, 204 bp, Glycine max
  Clone ID: 6HA-02-Q1-B1-C6
gttcgatgttgttgaccttcgagagcgatgattgattgattcataaatcatcatatgagtgtgggctctctgatgaaagcagtgatttactttgcatcttttctaccagacgcgatatttaaaattgcattggtataggtggattcttttgtatttatgaatggagagaattactaattgccaattcctcgattttgtactaga

SEQ ID NO: 866 - DNA, 196 bp, Glycine max
  Clone ID: 6HA-02-Q1-B1-C7
gaacaagctgggaagcaaggaattatggtgacgtctcagagtcagaaccctataaagcaaatccaagcgcgcttcaaggggttgggaaatgggttccgcctctgggtccccaagcagtccctccccgtcaaaggcgacgtcgtaaacaccaacagcgccggccatggcgccgctattcgcgccttcatgggcaacc

SEQ ID NO: 867 - DNA, 395 bp, Glycine max
  Clone ID: 6HA-02-Q1-B1-C8
actgatttctcatttcgtagcatcaaccgctaactatccagatactaattttcgctttggtttggttcaattctgtccgcagacatggttttcaggccaatgagtggtaattggttagcactgttaagaaacagttatggaggtaaagccgcgtacgcaacctcaacagcaccaaagatgaaagcgtatgcagctgcggctgattacggacacaagcaacaacatgggaagtcggccaaacgggactttgtggcaatttacgtggcgattgggatgatagctctgtccacagggctgggtctccacactgcgtggcagcaactgaggaattccccgacggtgagcgtgaagaagcagaggaaggagaccctccccgaagtggtggaacccgacca

SEQ ID NO: 868 - DNA, 271 bp, Glycine max
  unsure (1)..(271): unsure at all n locations
  Clone ID: 6HA-02-Q1-B1-C9
cangcgtttggttgaatggaagcgcgtgggcgggtggttcgtgtttccgttcacaacagtgtcaatgtcctcctcccttcttttcccttttaagtcagagctttccccttcccttcaaattctcctcaaagcctacctcgcgttccaccgcgctcttcgcgtcttttcgcaaccgactgcatcttggatactggaatagtgtgccaatatgagctctcgggcaggcaatggacctgccgtcagaagttatcggaggaaaaagacagcgttg

SEQ ID NO: 869 - DNA, 399 bp, Glycine max
  Clone ID: 6HA-02-Q1-B1-D1
gaagagaagggatttggatctgaaaagagaagatggggggaggaatggaagcaaacaagaacaagttcatagaggattggggcactgccagagagaatctggagttcaatttccgttggactcgccgcaaccttgctcttgttggcatcttcggcatcgctattcccgtcctcgtctacaagggcatcgtccgtgaattccatatgcaagatgaagataatggtcggccgtacaggaagttcatgtgagagagtatggagagtcttttgtaataattcgtcaagttagaccttgaaattaagaggctacaaaccatgtttttttttccctaattcccaaaggcttgcttgcttttaagtactctaaacctatcaaacctctccatgtttgcctgtcttc

SEQ ID NO: 870 - DNA, 254 bp, Glycine max
  Clone ID: 6HA-02-Q1-B1-D10
gctgtggatccataaggtagacaacgagttcaaaaagagagaaaaaaaggaaattaaaaaagaaaagaatttgcttttttatctgttgccatttttttttttttgccgtaaatgtagaatttgcttcgtgtaatttgacattttgacgtgctttcttcatcttcatttttactgcccatatgttgggtgagctgtatccaaattacttgcattgttttttattaaactttttaatttaatctacagacttcgta

SEQ ID NO: 871 - DNA, 134 bp, Glycine max
  Clone ID: 6HA-02-Q1-B1-D11
gagaaatactcaagcctggaaattgtggaggagaacccaaactcgggtggggtccttcctaacctaaatcctccgttacgaacggaagctctctcgcgcgaattcttcaacgagttcccgaaagctctggacgc

SEQ ID NO: 872 - DNA, 282 bp, Glycine max
  Clone ID: 6HA-02-Q1-B1-D12
ggcaaagcgaggccatgccctcatgtgcttggcacgtgtttcactcttcctctgcgctctaaccctatccgctgctcacggaagcaccacggttcaagacatcgcgagaaagttgaaactcggggacaacgagcttctgcgcacggagaagaagttcaaggttttcatggagaattacgggaggagctactccacagaggaggagtatttgcgccgtttggggattttcgcccagaacatggtcagagcggcggagcatcaagcgctggacccaacgccgtc

SEQ ID NO: 873 - DNA, 396 bp, Glycine max
  Clone ID: 6HA-02-Q1-B1-D2
gtgcgtgtggaggttcttttctttgagactttccttcaaattctagattgcttccctttcttttctttcccttataaccagcaacctctccctttcccccttttcatttcttcctcgattttccatttccataaccttagtcatcttcttctttcatctttctccctaacggtatcgagggaaaaatatggcggaagaacacagatgccaggcaccgcgcttctgcgccaacaattgcggtttctttggcagccctgccacgcagaatatgtgctccaagtgctaccgcgatttccagctcaaggagcagcaatcttccaacgccaagatggttctcaatcagtcgctggttccatcaccgccaccggcggtgatttctcagccgtcgtcctcttc

SEQ ID NO: 874 - DNA, 327 bp, Glycine max
  Clone ID: 6HA-02-Q1-B1-D3
aaaggtgcagttcgagtggttgtgattctcggggtggcagaggcagttattgtgagcagtgtcttcattagttgccgacatgtattaggatacgcgtacagcaatgataaggaggtaatcgattacgttgcagagatggctccactcttgtgtgtgtctgttactgccgatagtctaattggagcactatcatggattgcgagagggggaggattccaggaaataggggcctatgtgaacctgggaacctattatcttgtgggaattccaatgggtttggtaatgggttttcaaccgcaactaagaaccaagggccttttgatggga

SEQ ID NO: 875 - DNA, 417 bp, Glycine max
  Clone ID: 6HA-02-Q1-B1-D4
gaatgtggtagatgtttcttatggtggggaaaatggattcaatcaagctattgagctatctgcagagattttatcaaatgtgaagttcattcaagagaaacgcttgatagggaaatattttgaagagatcagccaggacactgggaaatatgtctttggggttgaggacactttgaaggcactggagatgggtgctgtggaaacactcattgtatgggaaaatttggatattaataggtatgtgctgaaaaatggtatcactggtgagattgtcattaagcacttgaacaaggaacaagaggctaatcaaagcaacttccgtgatttggccacttctgcagagttggaagttcacgagaagatgcccttgctcgagtggtttgccaatgagtacaaaaaatttggatgccccctgga

SEQ ID NO: 876 - DNA, 402 bp, Glycine max
  Clone ID: 6HA-02-Q1-B1-D5
cgctcttctccgccacttctgaatctattgaatcaacaatcatgtcggacgaagagcaccatttcgagtccaagggcgacgccggaacctccaaaaccgaccctcagcaagccggtaccatccgcaagaacggctacatcgtcatcaaaggccgcccctgcaaggttgtggaagtttcgacttccaaaactggaaagcacggtcacgctaagtgtcactttgttggaattgatattttcactgccaagaaacttgaggatattgtgccctcttctcacaactgtgatgttcctcatgtgaatcgtactgattaccagctcattgatattgctgaggatggatttttgagtctgcttactgaaaatggtaacactaaggatgacctcaagcttcccactgatg

SEQ ID NO: 877 - DNA, 291 bp, Glycine max
  Clone ID: 6HA-02-Q1-B1-D6
acagcttccaacaaattactaaggagagttatgcaagatccattgcggattacgtacacaatttccagtcgaaaggtgacgctgtaacctcaaatgtcgacactcatcaaccaggtttcagccgtagtatcagctacatcgtcatcatgggctgatcctgccttgttgtagcagttacgacttcctacactggtagccacggtcacacttgctgtcactttgtaggtcctgatattttcactgccatagcaacttgaggatcttgcgccctcttcccacaactgtgatgtc

SEQ ID NO: 878 - DNA, 416 bp, Glycine max
  Clone ID: 6HA-02-Q1-B1-D7
caaacacaaacacaatcgtcaattaaaacaacaacaatatcgaagctgcacaaattaatatccaacactctcaagctttcgagtttcaaactctgggcgctgaatttggttcatttttctaagcattgagtgacggccaggagcaatacagcccaggagaaatcctctctggtgtcagctcttcactggaaaccaaccattatatgtataatagatcaatctccactttggacagtttcccattatattctgatcggaactctcttctacagaatgcgagttctaatcagaaaatccaacatgctttgctggagctagaaactgctttgatggccccggatgacgatcaagttaccacaccgaatacattggccgagagacacaggtcctggaacaatgagaaccatgtgtcacaa

SEQ ID NO: 879 - DNA, 421 bp, Glycine max
  Clone ID: 6HA-02-Q1-B1-D8
gcacaaagggcgtaggagaagagggtttcgttccgtttcaatggggagcgaagagcagaacggcgaattctacctgcgttactacgtcggtcacaagggcaagtttggtcacgagttcctggagttcgagttccgcccagacggcaagctccgctacgccaacaactccaactacaaaaacgacaccatcatccgcaaggaggtttacctaacccccgccgttctccgcgagtgccgtcgcatcatcgccgagagcgagattatgaaggaagatgataacaactggcccgaaccggatcgggtggggcggcaggagctcgagattgttatggggaacgagcacatttcgttcaccacgtcgaagattgggtctcttgttgatgttcagagcagtgctgaccccgagggtcttcgcatcttt

SEQ ID NO: 880 - DNA, 354 bp, Glycine max
  Clone ID: 6HA-02-Q1-B1-D9
cttttgttggaggatttctttcacaattggttaagcataagcccattgaagaatgcattacagctgggtgttatgcagccaatgttatcatccaaaggcctggctgcacatacccaccgacgcctgattttcattgagtgattcctctttttctgttactgctatgaatttttttcattttatcattgagaacgattttaatagccacactctaactggtgtggggttttttaaccccccggctatggaaaacagcgtgaaaaagttgcagcaagacatataacttgaataagttcatacatatgaagtccgatcaagcatcaattctcatattgctgtctgtgatcatttttc

SEQ ID NO: 881 - DNA, 353 bp, Glycine max
  Clone ID: 6HA-02-Q1-B1-E1
accctaagttaaccccggaatccggcccaaggtgaaaatgtgaacaataacccaaattaaagaaccaaacatacttaaatttaagttcattccatttaacaaaccggaaagaatacaaaaattggctcccccttgtaacccaaaataaggccaaaaattaacctcctttaattttttggactactcaagagatcaacttcttattctttagaaatcatatttcacactgacatgttagataattaattaagcactcgtatatcttcatgctgaacacattcttttttatttgtttaagttatttactatattgcattattgttgctacgccttcagaacatgggcatcaatat

SEQ ID NO: 882 - DNA, 345 bp, Glycine max
  Clone ID: 6HA-02-Q1-B1-E10
aagagagagacccttttccttctctctggctttcctttgacgcttctgacactgctccttttctttctctccgtgtcctaatggctctccccgactcttcttcctgccgcaactccctgatcccctccttcatctactcctcttcctccaaaacgctccctctacaccacatgctcaactccgcctccgccgccgccccctcccagccgccggaaaacctccacgccggatcgcgcggcctcatgattccctctcccagcgagtcacgcaagatcgagatgtactcccctgccttctacgccgcctgcaccgccggtggaatcctcagctgtggcctcactcaca

SEQ ID NO: 883 - DNA, 335 bp, Glycine max
  Clone ID: 6HA-02-Q1-B1-E11
gaaattttcagatggagcaatctgaggatttgatggaagttgaagaaagttgcttttgaggtcttgtatggacaacgggatgtctgatttccatttgagaaattgtttagactttgggcgtcttggatgttcttacgccctagtaaaagattcagtttagggagatataattggagtttctaagggctctttcttttactcctttactttctatttctttctatataggtgggctaatggctcttgttcttgaattagtactagtagtcaaataacgagaattttagatagctagcttgtgtaaaatgaaatcgttttcaattcatacaatgaag

SEQ ID NO: 884 - DNA, 329 bp, Glycine max
  Clone ID: 6HA-02-Q1-B1-E12
gttcccaaattcattttaatcctaattctgcacttcttgatcattcgatttttctcctcaagatgcagatattcgtaaaaactttgaccggcaagaccatcacccttgaggtggaatcctccgacaccattgacaacgtaaaagctaagattcaagacaaggaagggatcccacctgaccagcagagacttatctttgcgggtaaacaacttgaggatggtcgcacccttgccgattacaacatccaaaaggaatcaaccctccatctcgtgcttcgcctcaggggtggcatgcaaatctttgtcaagactttgaccgggaagaccatc

SEQ ID NO: 885 - DNA, 401 bp, Glycine max
  Clone ID: 6HA-02-Q1-B1-E2
ccgatctcatctccgacatcgtggtacggtacgagggatcgttgccggatttgttcagggaagggcactccgtcgttgtggaagggctcgtgaaaccgttcacggacgagatcaggaaggaggtgtcggcgaagaacgtttccgagaaggcgaggaagatagagtgctatttttcggccacggaggttctcgccaagcatgatgagaagtatatgcctaaggaagttgctgctgctattgagaagaataagaagattattgaggatgctgccactgccaccgccaccgccaccgtggccatggagggaccaaagacaccatagatcgatggtcgtggacgtggtataagcttagctgttcatgctcaaatataccacttctgaattttaggcaacaattta

SEQ ID NO: 886 - DNA, 414 bp, Glycine max
  Clone ID: 6HA-02-Q1-B1-E3
gagcattttccaacacgattacacgaccgaatcaaacccctctttctctccgaagctgcttttaatatcgtactggccttcgattgttctcctctttaatacatactgttctctcttcgatttgagggaacagtacaagagtctgagcatcggttaacccaactgcacaggtagtctccaaataatggagcctcatgatgagactggatgccaggctcctgaacgccccattctttgcattaataattgtggcttctttggaagagcagctaccatgaacatgtgttccaagtgttacaaggacatgctgttgaagcaggagcacgacaaatttgcagcatcatccgttgaaaacattgtgaatggcagttccaatggcaatggaaagcaggctgtggctactggtgctgttgc

SEQ ID NO: 887 - DNA, 395 bp, Glycine max
  unsure (1)..(395): unsure at all n locations
  Clone ID: 6HA-02-Q1-B1-E4
gttctggaaagtgcaaaattcccgagggacagtgcccgactggaacaggacctggatggatatgctgcttggattgcaagaacatcaccaaaacacggtgggatgatcctccatacaaaattaatgcctcaggaataaaagctcctattggcttcaaaacaatagccactagtgcataccactataacggcgtcttggagtatgatgctcacagtctttatggcttctctcaatccgttgcaactcacaagggccttcaagggcttcaaggcaaaagaccctttattttgtcccgctccacttgtcggttcaggcaaatatgccgcacattggactggtgacaatcanggcacatgggagaacttgaggtactcaatatccacaatgctcaattt

SEQ ID NO: 888 - DNA, 413 bp, Glycine max
  unsure (1)..(413): unsure at all n locations
  Clone ID: 6HA-02-Q1-B1-E5
gtcagcggttctgggttggagacagagagagagaagttttcagtttcagaaacaaagcaaaagcaatagcaatgggttggatcggtgagactgttgattccatcaaatctcttcagatccgccaggtccacacccaggctgtgagcctaggcatgattgttacgtctgcactggatataaggaaaggcattaagttccgttactggcagtaaaccccccgatgtcgtggtcctttctggaagcatggaacccggattcaggcggggagacatcatggtcatgcacatgagtanagatcctattctggcatgggagattgttgtgtttaatgttgatggacgtgagattccaattgttcagcgtgtaattaaggtacatgaaagggaagatactggggaaggtgatggtctcac

SEQ ID NO: 889 - DNA, 369 bp, Glycine max
  unsure (1)..(369): unsure at all n locations
  Clone ID: 6HA-02-Q1-B1-E6
ataaaaaacaatggagttggacttgacaccaaagacagcagaagtgttgtttgagggagatggtggaggttactacacttggtggagttctaaagtgccactgctggccaagaccaatgttggtgctggtcggttagtgcttcagcctcagggctttgctattcctcattattcagatatatccaaagtaggttatgtgcttcaagggaacgatggcgtagctgggatggccctccgcaacagtactactagagaagaggtggttgtgaagcttaagaatggagatgttataccagtacctattggaagtgtctcgtggtggttcaacgatggggactcagatcntgtcattgtttttcttggagaaac

SEQ ID NO: 890 - DNA, 344 bp, Glycine max
  Clone ID: 6HA-02-Q1-B1-E7
atcaccaatgacaagggtagattgtcaaaggaagatattgagaagatggttcaagaggctgagaagtacaagtctgaggatgaagagcacaagaagaaggttgaggccaaaaacgctttggaaaactatgcatacaacatgaggaacaccgtgaaggatgacaagattggtgagaaacttgacccggctgacaagaagaagattgaggatgcaattgagcaagcaatccagtggttagacagcaaccagcttgcagaagcagatgagtttgaggacaaaatgaaggaattggaaagcatctgcaatccaatcattgccaagatgtaccaaggtggtgctggtcc

SEQ ID NO: 891 - DNA, 392 bp, Glycine max
  Clone ID: 6HA-02-Q1-B1-E8
cgctttctcatcgctgatcaaacttcaaaccctagctaggatttcaaggtacacttaacgatggcttcaaaacgcattactaaggagttgaaggatctgcagcaggaccctcctgtttcctgcagtgctggccctgttggtgatgacatgtttcattggcaagctacaattatgggtccaactgacagtccttatgctggtggtgtattcctggtgaccattcacttcccaccagattatccatttaagccaccaaaggtttccttccgaaccaaggtatttcaccctaacataaacagcaatggaagtatctgtctggacattctgaaagagcaatggagtcctgcccttacaatttccaaggtgctactttcaatttgctccctgctgac

SEQ ID NO: 892 - DNA, 157 bp, Glycine max
  unsure (1)..(157): unsure at all n locations
  Clone ID: 6HA-02-Q1-B1-E9
gaatttccaatttgtggaggaaggaaaatggtcaaaagatgctgaaacaataaaattgaagagtaaatttggagaagctcaagcaaaagagcacaaggccaaacaagcacagttggcaaaggcaaaagctgctcctgatatanatcctaacttaata

SEQ ID NO: 893 - DNA, 254 bp, Glycine max
  Clone ID: 6HA-02-Q1-B1-F1
accggattccggtccaaggcctttaacaaaaaataacttgacaaataaaatcacaatgtcaatcatcccaaacttgttcggtggtagacgaagcaacgtcttcgacccattctctctggacgtatgggaccctttcgaggggtttcctttttccacaggtcacgtgccttcctctggtggggaaagcagtgccatagccaacactcgcgtggactggaaggagactccggcggctcacgtgttcaacgttgatc

SEQ ID NO: 894 - DNA, 384 bp, Glycine max
  Clone ID: 6HA-02-Q1-B1-F10
aaggaatagaacgtgcgcgaagcaaacatggatcttctgtgcaacgcttattcgaatgcctcagacgacgaagaagaagaacaaccaaaacgacagagagtatccctctcttcccctaacccgccaaaacgacaccttcctttgtcttctcctccttcattcaacaaccaaacacaagctcccatgctcggaagatacatttccaaacgacagcgcgcattgatgggctccacccctgcccctcttcctgaaccggttcctgttccgtctccgttcacgctatctgggagtatcttggatgctgatatacaccataatattttatcattgttgaaaagtaaagcaaagggtcatcaaagcccaaacctgaaatctgaaaagcta

SEQ ID NO: 895 - DNA, 362 bp, Glycine max
  Clone ID: 6HA-02-Q1-B1-F11
ccttagccgaggtcacgaggagcactagctagtttcacaatttccaaatggctaggggattgaagaagcatctcaagaggctcaatgctcctaagcattggatgcttgacaaactgggtggtgcatttgcgcccaaaccctcatctggaccacacatatctagggagtgccttcccctcatactcatcctacgaaaccggctaaagtatgctctgacttaccgtgaagtcatcgctattctgatgcatagacatgttcttgttgatggaaaagtcaggactgacaagacttaccctgctggtttcatggatgttgtttcaatcccaataaccaatgataacttccgcctgctctatgacact

SEQ ID NO: 896 - DNA, 315 bp, Glycine max
  Clone ID: 6HA-02-Q1-B1-F12
caagaaggagactggggaggtttacctcgccctgttgccggtggtgttcggtatcgtcgtggcgagcaacagtgaacccctttttcatttgtttgggtttctggtctgtgtcggttccaccgctggtcgcgctttgaagtctgtggttcaggggattttgttgacttctgaagcggagaagcttcactccatgaacttgcttctctacatggcacccttggcggcgatgattttgttgccgttcacgctctacattgaaggaaatgtgctggctttgactattgagaatgcgaaaagtgacccctttattgtgtt

SEQ ID NO: 897 - DNA, 397 bp, Glycine max
  unsure (1)..(397): unsure at all n locations
  Clone ID: 6HA-02-Q1-B1-F2
acgatttcgattcaccctttctcncacacactccgattctccttgtaaacagcggtgccagaagttgatataggatgggggcaatgatgtcgagattctggttcatgttattccctgcaaaagagtataagattgttgttgttggattggataacgctggaaaaaccactaccctttataaattgcatctgggtgaggttgtaactaccaaccctactgttggtagcaacgtcgaagagctcgtctacaagaatatacgatttgaggtctgggatcttggtggacaagaaagattgaggacatcatgggcaacatattaccgaggaacgcatgctgttattgtggtgatagacagcagtgatagagccaggatctctatcataaaggatgaactttt

SEQ ID NO: 898 - DNA, 316 bp, Glycine max
  unsure (1)..(316): unsure at all n locations
  Clone ID: 6HA-02-Q1-B1-F3
tccaagcgcaacgcgtaaatccaactccaagcctctcggaatcgccaagaagtccaaaccctcggtttccctcaaaaaccagattcgatcccttgagcgcatgctccgcaagaacctgcctcccgaggtgcgcgaggcgcaggagcaaaagttggaggcactgaanaggcagcaggagaatcacaagcgcctcgccgccgaacgcaagatattcttgcgcgaacggaagattaagttcctcganaagaggaaaatccaaagacgaatcaaacgcctcgagaaactggaacgtggttcttcttcctcttcttcctct

SEQ ID NO: 899 - DNA, 397 bp, Glycine max
  Clone ID: 6HA-02-Q1-B1-F4
aattcatctcagttggcgactgcttcacgtgataagtctgtgcggttatgggacacaaccaatccaagccgttgtgtgcaagaatatagtgggcattcatcagctataatgtctcttgatttccatcctaagaagactgaagttttctgcttctgtgatggtgaaaatgaaattcggtattggaatattaattcagccacctgcacccgtgtaactaagggagctagtgcacaagtgaggtttcagcctagactagggcgtttcctggcagcagcttctgataaaggagtgtcaatttttgatgttgaatctgacacacaaatttacaccctccagggacatcctgaaccggtgagctatatttgctgggatgggaatggtgatgccttggcatctg

SEQ ID NO: 900 - DNA, 366 bp, Glycine max
  Clone ID: 6HA-02-Q1-B1-F5
caaaggggatgccatgtggtgtttgctcatgagtgatcttcatgtcgggagggccagtgctatggagattccggtgccggacaatgggagcactgtgccggctaccggtgacggtggtgccaattcggctggtgttatggcgccggctttgtgtaggtttcatggggggtggggatttggaaatgggggaggcttggaatttcctgtgaacgggatattctcatgtggtgcagagatgaatttgcagctgcaacgagacattgagtttccgaagaggttaaatctttctccttcgatcaagtccttattgaagagaaatgttgctatgtttgctgctggttttagggcgaactccaagcaattgca

SEQ ID NO: 901 - DNA, 302 bp, Glycine max
  Clone ID: 6HA-02-Q1-B1-F6
ccaaactggggagagagcttttgcagcaaaagggtcttgttcaaagcttttggttttcagtttgaaagcataaaaatgattcttttagatttctaatagcacatgtcatggatctggaccgtgggattgttcagaactctgataagaggaaagaatcatggaaaacggtgttaactctggcatatcagagtcttggagtagtgtatggagagattagcacttcaccactctacgtgtacaggaacacatttgctgaagacattggtcactcagagaacaatgaagagatttatggtgttttg

SEQ ID NO: 902 - DNA, 379 bp, Glycine max
  Clone ID: 6HA-02-Q1-B1-F7
gagagatggcaacagctaacaggcacagctatgagcttctcctactccaccgacttctgctttactttgtcgtctcatgctcattatcgttatcttgggcagtgcaagatggtgaacgggttatggtgcgcagcaccccacagaagaactggtggaaaccaagtttaacaaatgcagaagatgatgatcctcctccgaggcccttgaaggttacttttgctgaacctgcaactcactggaccgatgccatccccattggtaatggccgtctcggtgccatggtttggggtgccgtaccctcagaagctctccagctcaatgaggacacactttggactgggattcctggagactacaccaacaaaagtgctccgcaagc

SEQ ID NO: 903 - DNA, 114 bp, Glycine max
  Clone ID: 6HA-02-Q1-B1-F8
aaaaaaaaaaaaaaaaaaaaaaaaaaaaaaaaaaaacataaaaaaaaaaaaaaaaattaaaattaaaattataaaaataaaaaacattaaaatggggcgtccgcagtttatttt

SEQ ID NO: 904 - DNA, 346 bp, Glycine max
  Clone ID: 6HA-02-Q1-B1-F9
agaaagagggcaaggaaagtaggaggggtttctatgtcaccacagttgatgcaacagctgagtgctgaggtgagtggcgtgttccaagatgtacgtaagagtgcttgggacaagaagcaatggatgatgagcaggataatgcagttggaggagcagcaaataagctaccatacgcaagcttttgagttggagaaacaaagattaaaatgggcaacgtttagcaccaagaaggagagggaaatggagacagccaaacttgaaaatgaacgcacgacgcttgagaatgacagaatggttttgctcattcgccagaaggaaatttgaatgatgagtcttcaacaccaac

SEQ ID NO: 905 - DNA, 423 bp, Glycine max
  unsure (1)..(423): unsure at all n locations
  Clone ID: 6HA-02-Q1-B1-G1
caaggtctctccgcagcacccttcttcgcccgttttaacctccagaacccaccagcaggtaagataaggttaaacaatacaacgttaaccccaatgggcacttcaggaaacactggcaaaactatgtgaagacttggtttaatcaaccagcacggaagaccagaaggcgtttagctcggcagaagaaggctgtcaagattttcccaaggcctactgctggacctctcaagccaattgttcatggccagactctgaaatacaacatgaaagtcagatctgggagaggattttctctcgaagagttgaaggctgtgggaattcccaagaaacttggtccaactattgggatttctgttgatcaccggagaaagaatcgttctttggagagtctgcangccaatgtgcagaggctcanaacctaca

SEQ ID NO: 906 - DNA, 350 bp, Glycine max
  Clone ID: 6HA-02-Q1-B1-G10
ctcccaaaccctcttccctctctccctaaccaaaagactccaagaccattcacattcacattcaatccaaaaccttcaacttcctttcctcccaattctcaaaataccaaattccaataaaaaatggcaccttcctttcggaaatccctccccctccttaaaaccccccctctcctcgtcctcctcctctccgtctccgcccacagcgggcaccgcgacgacgacgacgacgacgacgcggacgccggaggcgacgccaccccaaactccgtgctcggtctttgattctcgcaaacgtgtggtgtttgatcgttattttttttgctactttgtatcgggcgtttccccct

SEQ ID NO: 907 - DNA, 367 bp, Glycine max
  unsure (1)..(367): unsure at all n locations
  Clone ID: 6HA-02-Q1-B1-G11
gccagctgccaactgttccagcttctgctcttgtatctcttcaacccaacactacaaattctgggtttaactccggcagttcaactgtccctcagaggaacctggttccatcatcaaggactacaacctcagggaagtcaaaacagcatgacaatgatttggatgttgacccttggacgcttttagaagatggtgctggatcntgtccgtctgcaagtaatactgatatcatangaagtggtgaccgtgttaatattcgagctgccagctggcttaaaggggctgtaagggtgcgacgaactgaccttacatatgttggtgccgtggatgaggataattgattaacaagattttttactggtttgga

SEQ ID NO: 908 - DNA, 322 bp, Glycine max
  Clone ID: 6HA-02-Q1-B1-G12
gcagtttgtgacgggcgcacctcgccttcctccgggaggattggcatctctcaatccgaagttaactaatgttcgaaagcattgtagcaaccgggcagacacagacctacctagcgtgatgacttgtgcaaattatctcaagctacctccgtactcatcaaaagaaaggatgaaagagaagctcttgtatgccattacggatggtcaaggatctttccacctttcataattgcactctcttgactggtccatatttgaatcatccaaatgtaattaatacggtaattgagagttatgtaaataagggtgctaatgacttgct

SEQ ID NO: 909 - DNA, 424 bp, Glycine max
  unsure (1)..(424): unsure at all n locations
  Clone ID: 6HA-02-Q1-B1-G2
cacaaaacaaaaagtttacgttacaaatcgcataataaccgtcctaagtttattgagagaattttgcaagtgtgagaaacatggcatctcgtcaaaacaacaagcaagagcttgatgaaagagcaaggcaaggagagactgttgtcncgggtggaactggtggcaagagcctggaggctcagcaacaccttgctgaaggaaggagcaagggagggcaaacaaggaaggaacagctgggtacagaagggtaccaggaaatgggacgcaaaggagggttgagcactgtggacaaatcaggagaagaacgtgctcaagaggaaggcattggcatcgatgagtccaagttcaggactggtaataacaagaaccagaatcagaacgaagaccaggataagtgataatgtaacacccttcactagcatgt

SEQ ID NO: 910 - DNA, 345 bp, Glycine max
  Clone ID: 6HA-02-Q1-B1-G3
cccggaatccgctccaaaaaaaaaccctagcaggtggagcaatggcaaaacgttgaagtcgatgttgccggaacaacaacagcagggctggccaaaaaagagaacgttcaaaaattcagttttccaggcgtggatctcgatgcacttctcgacatgtccaccggataactcgtcaagatgttcagtgcccgcgctcgtaaaaagttccagagaggcctcaccagaaagcccatggccttgatcaagaagctccgtaaagcgaaaagggaagctccaccaggtgagaagccagaaccagtacgcacccaactccgcaacatgattattgtgcctgaaatgaatggt

SEQ ID NO: 911 - DNA, 419 bp, Glycine max
  Clone ID: 6HA-02-Q1-B1-G4
gcaatatagcctttcaaattgcagcatctataaaacgagcacaatcatgtgacaaggttgtcaatgattccaaaccatcaagagtttgtgaaaaggagaatgattcatctcctaatattattgcagaaaagttagtagcttctttagatccaactgtgaaaaattctggtttgtatatcagggcttgcaatggacatatcaatttttatgcttctagtaagcaagtttccttgaacagaagtgttcaaaatgctccagttcctaaaaattctagaatgaagcattacagtggaagaaattgtttgattggtcaggtaaaaaggcgaaagcttgagatccgtttaaacagattcagttttgattcagaagaatttgctttgttcagaagatatcagctcaaagtacataatgaataacca

SEQ ID NO: 912 - DNA, 411 bp, Glycine max
  Clone ID: 6HA-02-Q1-B1-G5
gcctcttggtttccgacacgttactcttctcccctccgattcgctactccccttcgccggcgctgtccacgttcttcgccgtcaagaaccgccggtgcaggaggaggagcagcttctgttccgcctccaaccccgacaccttaaccgccggtggtggcgccgtcgtcgtcggcgccggcgagaagcacgaggaggatttgaaatcttggatgcacaaacacggcctccctccgtgcaaggttgttctgaaggataaaccttgccccaatgattctcataagcctatacattacgtcgcagcaagtcaagatcttcaagttggtgatgttgcattctccgttcctaattccttggtggttacgctggagaaggtcttgggaaacgagactgttgctgaattattgactacta

SEQ ID NO: 913 - DNA, 413 bp, Glycine max
  unsure (1)..(413): unsure at all n locations
  Clone ID: 6HA-02-Q1-B1-G6
ctgctgagaaggctaagaatgctaaagataccactgtgcagaaagctggagaatacaaggattataccgctgagaaggcaattgaagggaaggacagtgcagtggggaagcttggggagctaaaggaatctgctgctgatgctgctaaaagggctatgggtttcttcaccggtggcaacaaagaccaaactagagaggaggaggaggaaacgaggcggagtatgcaggaggtgagggtgcaagataaggagtatggaacgggacgtggtactggagagaagttggtgataaaaatggaagagtcgcggccaggagcggtggcggatgcgctcaaagcagcgaatagggccatggacggcgatatggangaggaaggcgtgcttcatgtggagcgtcgtanggagaaaatgtga

SEQ ID NO: 914 - DNA, 412 bp, Glycine max
  unsure (1)..(412): unsure at all n locations
  Clone ID: 6HA-02-Q1-B1-G7
atgaagtgcttgcatcaatcccaagaggaacaatgcctgttgcagggcctgctgatgcccttccatactgctacatgccgcctcagcatccgtcccaagttggagctgctggtgtcataatgggtaagcctgtgatggacccaaacatgtatgctcagcagtctcacccttacatggcaccacaaatgtggccacagccaccagaccaacgacagtcatctccagaacattagctgatgtgtcgtggaaattaagataaccaggcactggaatcagttgtgaatgtcaaactgaatggttgggaaggtcgatactacatagcgagcagaagctgtagctgatagtttacatgcaatgcagactataaacatatgtagataatgtgctanggaaaacttaaccttatctttga

SEQ ID NO: 915 - DNA, 422 bp, Glycine max
  unsure (1)..(422): unsure at all n locations
  Clone ID: 6HA-02-Q1-B1-G8
aatagatgggaaaaccttcaagaagcctcgtcgtccgtacgagaaggagcgtttggacgccgagttgaagctggtcggtgagtacggacttcgctgcaagagggagttgtggagggttcagtacgctctcagccgcatccgtaacaacgccagaaatcttttgaccctcgacgagaagaacccgcgccgtatcttcgagggagaagcccttctccgaagaatgttccgttacggacttctcgatgagactcagaacaagcttgattacgtgttggctctcaccgtcgagaactttctcgaacgccgcctccaaaccctcgttttcaagtctggcatggccaagtccatccaccacgccagagtcctcatcaggcagaggcacatcanggttgggagacaggtggtgaacatcccatcattca

SEQ ID NO: 916 - DNA, 202 bp, Glycine max
  Clone ID: 6HA-02-Q1-B1-G9
tgcagattccacaaccacgcaatcgcaattttgagagaaaaaaaaaaaaaaaaaagcaaaaacgaagaagaaactgaatgctgtgtagtactcgcgcgtgattgctacagattgagggattacgtcaagatagaatacagtattgattaaaatgctgctagtatttagtaatactcaaaaaaaattaaatgaaaagggcggc

SEQ ID NO: 917 - DNA, 420 bp, Glycine max
  unsure (1)..(420): unsure at all n locations
  Clone ID: 6HA-02-Q1-B1-H1
tccaacaacctttgcacaaaaggggcaattgcccaaacaattaaaacctcaaataagcttgggtcaagggccaataaaattttggaaaaagcaatatatactggttctgagtttgttgatactgttaacaccggtgatgatattggggtagttctggagtctacaagcttctatgctgagcaaagtggtcagatttttgatactggatcacttganggcccacatgctttatttgaagtgcgtaatgttcaagtttatggaggctttgttcttcacattggtaatgggactggtgtctcagttggcgacaaagtagtgtgcaaggttgattatggaagacgcgcccttatagcccctaaccatacctgcacacacatgttaaattttgcccttaaggaagtacttggtgatcatgttgac

SEQ ID NO: 918 - DNA, 310 bp, Glycine max
  Clone ID: 6HA-02-Q1-B1-H10
cgtctctctctcacctcaacaaactcctctgcatgccgccgctcaactcttcaacctctacttcgccaccgcgcagcagcgtcggagtttcgaccaaatctgtcggaaggccgatgatggtcgccgatttcgcgaggccggtggggcgtgtccgagcggtgacgagcgacgacgagtggggcccggagaaagacgatgaggcataccgcggacgagtggcggtggaagagaaaccgacggagacggaaacggagaagctgaagaatgctttggtggattcgttttatggcacggatcttggactgaaagc

SEQ ID NO: 919 - DNA, 311 bp, Glycine max
  unsure (1)..(311): unsure at all n locations
  Clone ID: 6HA-02-Q1-B1-H11
gccaaaccttacgcattccatttctctctagtcgctctctttcaatcacaacaacatggccgaacgtggaggccgagaccgtgccggtttcggtcgcggctttggcggtcgtggacgcggcggcgacaggggacgagggcggcgcacggcacganggcgccgcgacgacgacgagaagtgggtcccagtgacgaaactggggcgcctggtgaaggatgggaaaattcggaacctggagcagatctacctacactcgctcccaatcaaggagcaccaaatcattgacaccctcgtgggggccaacctgaaag

SEQ ID NO: 920 - DNA, 327 bp, Glycine max
  Clone ID: 6HA-02-Q1-B1-H12
cagctgccgagtgtgttgttgagaacgctcgagcaaaacatgacataacaaataccgttgttgctggatgtgcaactggaggtgcaatatcagcaaaaggtggcccaaaagcagcgtgtgctggttgtgctggctttgcggcattctcagtcgtaatagagaagtttttggagagacatcaataagggaattgacgttagcctaacacattttgagttcttggttaagtcttttgcccatttgatgcgggacgtgattgggggagcacacatattgcagtatttaatttacatcaatacgatgtcatttgcaaatgcatttctaatc

SEQ ID NO: 921 - DNA, 366 bp, Glycine max
  Clone ID: 6HA-02-Q1-B1-H2
gagagaattacagagcattttccaacacgattacacgaccgaatcaaacccctctttctctccgaaactgcttttaatatcgtactggccttcgagtgttctcctctttaatacatactgttctctcttcgatttgagggaacagtacaagagtctgagcatcggttaacccaactgcacaagttttaaactgccgtcatggtatcatcgtggtgttgcgggaaattgtggacaaatgtgcccgttgtggctgtaaattgtggctgtggagacttcaaaaaccttgatgttgctggccaaaattaaggtaatctccaaataatggagcctcatgatgagactggatgccaggctcctgaacgcccc

SEQ ID NO: 922 - DNA, 420 bp, Glycine max
  unsure (1)..(420): unsure at all n locations
  Clone ID: 6HA-02-Q1-B1-H3
cgaggttccgagttgcgagttgcagagagagcaatgagtcaggaatcgtttatatatagcttcctggctcgggggacgatggtgttaaccgagtacaccgagttcactgggaacttccctgcaattgcagctcagtgcctccagaaactaccctcttccaataacaagttcacctacaattgcgaccaccacaccttcaattttctcgtcgaagacggttacgcttactgtgttgttgccaaggaatctgttagcaaacaaatctctattgctttccttgaacgtgtaaaagcggactttaagaaaagatatggtggtggaaaggcagacacggctgttgccaaaagtctcaacaaggagtttggaccagttatganagagcacatgaagtatatcatagaccatgctgaagagattgaa

SEQ ID NO: 923 - DNA, 373 bp, Glycine max
  Clone ID: 6HA-02-Q1-B1-H4
gtggacgacatggaaaaactattaatatcttttctattgcttctgggcacctatatgaacgctttatgaagattatgattctaagtgttctaaagaatactcatcgtcctgttaaattctggttcataaagaactacctctctcctccttttaaggacttgattccacacatggccctagagtatggttttgaatatgaactagtcacatacaagtggcccacatggttgcataagcagaatgaatagcagcgaagaatttgggcatataaaatcttattcctagatgtcattttccccctttctttggagaaggtcatttttgtggatgctgatcaagttgttacggcagacatgggagtactctatgacat

SEQ ID NO: 924 - DNA, 367 bp, Glycine max
  Clone ID: 6HA-02-Q1-B1-H5
gttcccaaattcattttaatcctaattctgcacttcttgatcattcgatttttctcctcaagatgcagatattcgtaaaaactttgaccggcaagaccatcacccttgaggtggaatcctccgacaccattgacaacgtaaaagctaagattcaagacaaggaagggatcccacctgaccagcagagacttatctttgcgggtaaacaacttgaggatggtcgcatccttgccgattacaacatccacaaggaatcaaccctccatctcgtgcttcgcctcaagggtggcatgcaaatctttgtcaagacttttgacgggaagaccatcactcttgaggtggaatcctcggacaccattgataatgt

SEQ ID NO: 925 - DNA, 360 bp, Glycine max
  unsure (1)..(360): unsure at all n locations
  Clone ID: 6HA-02-Q1-B1-H6
cttagacaagatgtggagtactttgatttgcatatatgtaacgagcacctcagagatcatcactagcgtctccagcgacagcctcgtaattcaagatgttcttagtgaaaagtatgcattttacttcctggtggtgggggctgctatatgggcttcttcatgggcagagatttcgtgttggatatggagcggggatcggcaatcaaccacgatgagaatcaagtatctagaggctgtattgaaccaggacattcaattcttcgacaccgaggttcggacatccgacatagttcttgtcatcaacagcgatgctatcatggtccacgatgccattantgagaagttggggaatttcattca

SEQ ID NO: 926 - DNA, 263 bp, Glycine max
  Clone ID: 6HA-02-Q1-B1-H7
gataaggaaggggttttagaatataactccacatttttaagatttgatttgtttttctcttctcttcgcatcatcaatggcgatcctcattcctcaccctcctccccctcctcctcctcttgacgtcgtggccgaacccaatgtcgaatacttgtacctcccatgtccaattcccttctaagagctccatcgcgaagctatgatgtccatgaagccagatctttttgaaggcatgcgttttgatttcaccatgatgctcaatc

SEQ ID NO: 927 - DNA, 383 bp, Glycine max
  unsure (1)..(383): unsure at all n locations
  Clone ID: 6HA-02-Q1-B1-H8
caaatgtgggatgccaaaaatatgatgtgtgctgctgatccccgacacggccgatacttgactgcatctgctatgttcaggggaaagatgagcaccaaagaggttgatgaacaaatgatcaatgtgcagaacaagaactcatcatactttgttgaatggattcccaacaatgtgaagtccagtgtgtgtgatattccacccaggaatttgaagatgtcatccacctttattgggaactcgacatcaattcaagagatgtttaggagggtcagtgagcagttcactgctatgtaccggcgcaaagccttcttgcattggtacactgnggagggtatggacgagatggagttcactgaggcagagagtaatatgaatgatttggt

SEQ ID NO: 928 - DNA, 282 bp, Glycine max
  Clone ID: 6HA-02-Q1-B1-H9
gcaaggccaaggttcgtgttccagtccggtgcagctgcgaggagcagcgagccaccgcacccgatccagaaacctaccaagccattcctcttcgccaccgtttccctctccgcactcttcctcactctctccctcttcttcctcgaagcggagcccttcaaatcgctcctcttctggctcgcactctctctcctcgttgggcccttcgcccctccctccatcactggcggcgacgtccgcgtcggccgcggtgaggtcgtcaactttcccgattcggagccc

SEQ ID NO: 929 - DNA, 405 bp, Glycine max
  Clone ID: 6HA-02-Q1-E1-A1
gtggctctaagaaacataacataaatttcaaatgaaatttacaatgtaaagctccatctgaactatgatagaagcaacatgaataaaattgaaacttacaattgagggaagtacgttaacatagtgtagattttgcgtagataattttaacttttcatctatagtgccatctacaagcagcagtttcttggtatcctccatttgactgtaataattcacaatgttcttggttttatgtgtgggaacctccagatcctcaaacacaagaagctttccttctgctgcacgagctgacaaagcaatcttcagccctagacgccgaaccttcttattgactttgaaagcatggcttcggggcttatggccatgcatggtggcaccacccctgaactgaggcccacgcaa

SEQ ID NO: 930 - DNA, 332 bp, Glycine max
  Clone ID: 6HA-02-Q1-E1-A10
tagttgagaataatgttagcacacgtgtgcttgtctcagtgttgtatatgtaccatattaccaagaaaacactgcgcacttattcaagagtcaaataaaataaattcaacactcaaagccagatagcaaaattgaaggttgtgtgagccatcccagagttgcccatgatttggagtctagccgacaagatgtagcaatcaaggttgttggatggtaatataccagatccactttcataacagaatagctagtccaaatgttactagtttattttcgcacattctcacataacactttgagttccttaaaatcactcaaggaatttaagaaaa

SEQ ID NO: 931 - DNA, 260 bp, Glycine max
  Clone ID: 6HA-02-Q1-E1-A11
cagacttaagtagtggacttccctttcatattattttaattacatatacataaatctacaagtgttggttatgaactataatcacatactagcaaatgcaaatccaaccgaattgcctagtagtacagcctgaaaccaaaaactgaaaactcaagatgaatgatgaaatcccggtgagctaacattatcacttaacaatggtataacagtttcagttaaaaagttgaaacattgctcttctgttgtgtggaaacatgatt

SEQ ID NO: 932 - DNA, 376 bp, Glycine max
  Clone ID: 6HA-02-Q1-E1-A12
ttttgcttagagattgacatttgacaatatgaaataaaacaaacggaatttgtatacaaaagaaagagatttatagtcctttccgaacagcaataagtagtacgacaaaaataggagaaacaagaaaaagaatatacggcaaaacctgattcattgcactttcttgaaccgggccatctcctccgggatagttagatttattttcaacaaatgcatcaaaataattctggtagtctgagttctttaaataaaattgagatcctgttgtcatcttcatcatttccatagcctgaaagctgtacatgaactgtcttgctttcttgcttactttaggatttggatgagatttaagcttctcatacatacctcgagcctc

SEQ ID NO: 933 - DNA, 398 bp, Glycine max
  Clone ID: 6HA-02-Q1-E1-A2
tttcactagaaagcaacgcgttgcttaccaccatatgcaagaattgggagttgcaataatactggatacgaaaaagttgactcctaatacaacacaaatcttattataatactagtaatttgcattgaatattaacatcctatataacatgtcacgaaacatcattgtatcaactcatttctctactatctggccacaatcttcgatcactaccggttcagatgtcctgccacttcctgaacccactttctccatctcctccacaacgctgtatccatcaacaacttttccaaacacaacatgtttcccatcaagccatggtgtctttgcagtacatatgaagaactgagaaccattagtatggggtccagcatttgccatggagagaataccaggac

SEQ ID NO: 934 - DNA, 379 bp, Glycine max
  Clone ID: 6HA-02-Q1-E1-A3
gtagttcaacggatgaaggattataattatgcataacaagggtacaagcgtagtttgataatccagctaactcatactcagaatgaaccagtcaaaaacttatcaatgtatatgaaaagaactggaccatttagaaaaaaaaaaaaaaaaccaactctcctcactttctgcaaataaatgatcactccaacaagagaataacatgaaaaggataacaaaagctagaatgaaagggttacaatctgcaatgcattgcttccagacaaatcatgatgatagtagtctttcgcttcaataaccctatctctcaaacagttttagaagcactttctgtgcacaattgatggaccagactcgtcatattctgcctttgcaatcc

SEQ ID NO: 935 - DNA, 387 bp, Glycine max
  Clone ID: 6HA-02-Q1-E1-A4
gtaaaagacttttgtcagccccttctttgagcgaatttgataaacctgatcaaatacacattaccagagcatataacacaaaattattatcaagcaaccaaatataacaagggaaaaaaatctctccttttgtgaccaaataataagtctttgaacaaccaagtttggattaattcaacagcttcaatgaaataacttcattggtgctacttataaaacctaataaatgtaggaagaaatgaagccttatcaattacaaagagcaaactgacacaaagaatatcaaacctaacttatctaactgacttagtttaaataaatggatttcataccttaatttgtttgatgtctgaaatgtcagcaacatgagagttgatgcgaggatta

SEQ ID NO: 936 - DNA, 347 bp, Glycine max
  Clone ID: 6HA-02-Q1-E1-A5
gacaataataagcccggtagaataaaagcaaatttagctatatgaggcgccatcttgtacaagaaatatcgtgaagactaaaattaccaactttctttaacttgcaatgttggcatatgaattatgaggtatgattgctagtatataccgaattctgaagctgggtaagtatcctaaggtgcaaaatcaggtaatcttagctctgagacaaagtatggagttccttgagaaatgcaacaacttcatctggtgaagcaagcgtataccgagcattggtctgtgttcgtccaacagcgcacgagaagtaattctccttcttgaggtcaagcacattccaagagatcttt

SEQ ID NO: 937 - DNA, 135 bp, Glycine max
  Clone ID: 6HA-02-Q1-E1-A6
gtattgaaaaaaaacgaattttttggtataaatgaaaaaatctacgaaaaacaaagcaggtttaaaaaaataatgtgaaacataaagtaataggggatctgatttaaataaaaaaggttttgggaaaatgccaaa

SEQ ID NO: 938 - DNA, 397 bp, Glycine max
  Clone ID: 6HA-02-Q1-E1-A7
aactcatcaagaaagattgatttaaatttatccgaatgggttataggtaataacaaaaatgcattcacatattcctcatacaaatttaggaagacaagcacgtgcatgaatacctaaattgacaaacatatcgtacagtatatatgatggtttagatgtactttaaaccagagatatattgttgcctagtaattagatactgggccagggaatatataactcctaatatacccaagatcttaatcttgagtacatctgtacaagcaataggaagcagattaagaggcaaagttatccacggggatgagtcactctgcttcgtatggctccacacgtacctgttgaaaagtatatgactggggaaggtaagaatgaggagggccaaattcttcaccac

SEQ ID NO: 939 - DNA, 376 bp, Glycine max
  Clone ID: 6HA-02-Q1-E1-A8
acactaaattttatgattttcaataaatttcaactagtaataacaaatgtgttagaaagtgttactgtagcatttttcaggaagaattatcaggcgggatcatcgaaatatctgcctcaacaatggtttccgaataccaacattaataatgattaactgtattgggtttccaactaaacaatcagcgctgtataaggtgtttcaattaccagtagtatgttcctaaccaaaacaatgaaatctacttgcaaaaaacaacaagtgacaaaaatgccatacaataaatctagacaccaatcctcccttggtggaaaatgacaatctgatgaatggataacttccgggtcacccattttttctgcgaaagaaaaagaca

SEQ ID NO: 940 - DNA, 289 bp, Glycine max
  Clone ID: 6HA-02-Q1-E1-A9
gcaagagacacaacaaaatcaaacttggatctcaataagcaaaatacattgaagcagaattcaatttaaaattaaactgcaaatttgatattgaactactgaatcactacagataagtgacttttttagtcatttagactattcatcctcctggctgcgtaatctggctgttttgtttgtcacaacaacatcaagctgcgcggctctctcaactatatctttcctctttcttgtggatatattgtgggcaatctcagcacagtaagtcctgttgtgcatcatgagcagt

SEQ ID NO: 941 - DNA, 224 bp, Glycine max
  Clone ID: 6HA-02-Q1-E1-B1
ggcaagtggcaacctttttttacaacttttacctcaatgagcagtgttcaacacaaccgtgcaacatattaaacaaaaatttctgaaagcggtttccaattttcccatgtttcttctatctcagctccactgttctggacagtaccattgcagggtcggtgcttgttcatcggagaagaaattgcaggcctcgtcggggctcaaaaaattgtgcccctccgtct

SEQ ID NO: 942 - DNA, 109 bp, Glycine max
  Clone ID: 6HA-02-Q1-E1-B10
ctatgctataactcaactgttcacggaacttacacaagttgttagaatacacaggaaattcaaacacgtcgaaacgaatacggcaccaggatgacaaacagcacataca

SEQ ID NO: 943 - DNA, 204 bp, Glycine max
  Clone ID: 6HA-02-Q1-E1-B11
aaaagtgtctcacatgttcttgttgcaataaaagtgtcgtttaaaagggctattgttaatacatgtgcttcatcacaaaactgaaatgagaaacattgattcaaaacctgcctcaaaaataagatactatcccaaaaagatagttgacaaaactgataaaaacacccccctgaaatgaactcaatctaactaaacaatcccctg

SEQ ID NO: 944 - DNA, 276 bp, Glycine max
  Clone ID: 6HA-02-Q1-E1-B12
gccatccatcggcggaaagacgatgaggggcggagaaccgacaactttgtttcctcttatgagcatgatgatgaaaagggtaccctaatctgtgtcactagtggtgtttcctactttggtcttgccttggtcaaccacctcttgctcttaggttactctcttcgaatcactgttgacaacccagaggacatagagaagctgagggaaatggagaggcgtggtgaagtgagggctacagaacgaaatttggaagtaataatggcaaacctaactgat

SEQ ID NO: 945 - DNA, 394 bp, Glycine max
  Clone ID: 6HA-02-Q1-E1-B2
ttaaatagtccaatgttgacaaatttgtgtcaatactgttattatgttatggcctaaataagagaaatagaagaagatactaacaaaactatacacggttacttaggtgggtgaactagattggccatctaagctcaagttgcgtctccttttcttactcttctgcctaagtatctctttgagttccttttctttcttatccacaaaataaatgaagtccctgaagctagtagtgcttctgaaaagccttttacctttagtaggcctatttggtgaagtttcctcgtcgtcatgctcgggttctgggctgaattttgtgtagtgacatagcactctaatggagaatgcaaccatagcaaggagacatgcaatgccacatataagaaagagaccc

SEQ ID NO: 946 - DNA, 389 bp, Glycine max
  Clone ID: 6HA-02-Q1-E1-B3
aaaaaaagtagcttggttaggcaattcatgtcaatgttcatctacttgtttttcgaaaggttagtgtcctaaaaaccaaaatacgaaaccaaaaaatgttcatgacccaaaaacaaaagaaagggaaaacgaaaccatactcttctaatattttatgccagctccggaccagatggcactgcctcataaccatcacggtgctgcttactagcatctctttcaactgggatgcacttgaggatagcagctataggcatgctaaatgctccgattaccacacttagtaaccagaattgccagtttaaaggcacagtgctggcaaacgttccaaggaattcaactatcaccacttgaaatgcagcggtggcgacaattatcgccataaatat

SEQ ID NO: 947 - DNA, 400 bp, Glycine max
  Clone ID: 6HA-02-Q1-E1-B4
ttattgaaaatactatctttcaagcaaaattcgcaaaataataatttgaaccaacaccgatgcaaaatcctattagagcaaaaatacatcgatgcaaggaccaaataacagcattacaacattcacgggcaataccacaggcacaactaacagaaattaaatccaaagtagcattgttcacaagagaaaataaattcgactaagttcaaagtaaaataattcatgaaacaaatttaaagcctgtcttcaaactcggatagaggagtcatctgttccttcaagcccttcctcttgcgaatgtcagtgacaagctgtgcagcttgtgatccagcctccaatgggtcagaagacatcatgtcccagtgatcaaacacacattgtgggaaggcctggcctgatg

SEQ ID NO: 948 - DNA, 252 bp, Glycine max
  Clone ID: 6HA-02-Q1-E1-B5
tttagtttcttttaaagtgaaaaaatttcaatcaaaaacaaaaaatacaaaggggtagataccctaatacttaaaacttagaatagcaaggaataaaccataatacaaaaataacccagaagtactgaaaagggtgtccctgcgggtgatcacttcccttccgcattctcgccatcatccacaagatctgtgctggcattacctgcttccgtcttagttgtatcatcaatcctcctagcaaaaacatcaacg

SEQ ID NO: 949 - DNA, 378 bp, Glycine max
  Clone ID: 6HA-02-Q1-E1-B6
gtgaccaacggctatttgggcatccatagttaagtaaaaatacgatcgccagcaaaatagaaacagtataaaattcaacatgcaactaatctagatacactttcccctcccatgtcagcatggatcaaaagtaaaacttgcttttctctccactcaacagaagcagtaaagtcaagaagctctctaaaaattcctatttgtaactgtatatataaaaaagatccacctaactgcctgtttctgttggcattttccgtctctgtgacctctttcttttcctacgtctcttcactgtgttgtctccatctgtttccttcaaagggccaatattttgtttttcacttttcctcatcttgcatgaaagtgggttcgggccct

SEQ ID NO: 950 - DNA, 377 bp, Glycine max
  Clone ID: 6HA-02-Q1-E1-B7
ttttacatgtaacaagttattaacatatatattgcatatgtatcagattgggatgacattaccactttaataagacactacaccacttgcattgttcagtaaaactaagctctcagcataataaccagaataaacaaactctgtgtctacttcaatttgaagttccgtaaagcttgtcctctccatgtccagtgaatacaggcatctccttcctgccacatccacgagcaacaacacctctccgctgtgtgtaacacacagagctgccggtggaactgcaacttcaatgattgtcatctccaaagatggtattaccaaacaaaatgcgttcatactaaaagaaaagaccttattccaagactccaccacaccatact

SEQ ID NO: 951 - DNA, 278 bp, Glycine max
  Clone ID: 6HA-02-Q1-E1-B8
ttttatattttttatgttatttttatttattttgcatttgttttccaacagaaaagctcacaatatatacctacaaagttaaaacatctgcaagaaacccgataaacatgtaccaaaaagcagaacgagtcatacaagctgatggccctcccagcatcagattgtcaaaatctggagggcaatcttcataaagaaaccagctctacagcaccactacaagtggtgctcactccaacaacataagtaggagattttattaaaaagcttacaaaaggaaa

SEQ ID NO: 952 - DNA, 240 bp, Glycine max
  Clone ID: 6HA-02-Q1-E1-B9
agtaagtaaatcctccattttatgataatatggataaacagcataaagaaagaaagaaaaaggtcaaaacataataaccctgcatgagttgagcatgaaatattatttgactatgcagatctttatgacagaggcagtgccaatacgatgcaaggcaacaactgcatcaccaggcttacaaaggcccctttgtgttgcggacttaagagcagcttcgagaatgacctctgtatattctgc

SEQ ID NO: 953 - DNA, 371 bp, Glycine max
  Clone ID: 6HA-02-Q1-E1-C1
ggaaataacattctttttttttcagacacatggagatgtgtccaacaagagagcaataaatgcaacaaaaaccaaaaacaaaattaatgaacccagaaggaaaatgaaaaataatttgtagctttatttatacacaggaagaccaaagaaaaagctgttcagaaaactccgctagacatggaaggaatgtcatcaaagctccaaaggttcatgaggtttccaccatcctgagttgtgtcaccagatagcaaggattccaacgaagtatcgccccagctcccttcaagataagccatctgaaagaacttcaactcagattcgatatccacacgctcctcagagagtctctttgcagaatcatcttccataga

SEQ ID NO: 954 - DNA, 275 bp, Glycine max
  Clone ID: 6HA-02-Q1-E1-C10
gccataaacaaaattattgcatcattatatattacataaactataaaaaattataaataggttgacatgttaggctaataagccttcttaaaaacctaaccccgggctcaataataagtaaggcagaccaaatttggggtcaactaatttctactataaatacaagtattttgtttcacatttagtcactgaccataccaacaatatgattttctagcttgcaggggaaaaaaattatgcagcagacaaatttcatcagttactacttccacacc

SEQ ID NO: 955 - DNA, 352 bp, Glycine max
  Clone ID: 6HA-02-Q1-E1-C11
tgaagggaaaaaagagttcggtaatacattcatatatatatttttttaccaaaacgtgaaaaactacggttattattagacaaaaatgtaattaaccactgacattgggcgtggtagattcactttcccgtttctcagtcaaggacattggcgaagctggtaacttattctttgaaattccagcttgaccccaatccggtgaagctggtggtggttgaagtacgtgtacttgttcggtggaggaagtggaagaggtaacaccaccaccaccaacatcatctcctttctctagattctcagactcataattcccactttgaattttcctgagtgcttccagaacttcaaccat

SEQ ID NO: 956 - DNA, 252 bp, Glycine max
  Clone ID: 6HA-02-Q1-E1-C12
gcaagcaaaagccaatgcggacacctgatattgtaacaatgatattgggagaactggcgataattcactaacacaaatgatttaaaaataaacatttctaggatgtccctcattgatacataaaaactcatagcaaccaaaaagtactaactgaatgaaattcataacaaaatttgaaaattgcacatgatataatgcctatgatgcacttttcttcagcttaacaagctcttgcctaacaacagctgccct

SEQ ID NO: 957 - DNA, 368 bp, Glycine max
  Clone ID: 6HA-02-Q1-E1-C2
agcagagaactacatatagtattacatgcaacaacaagtggagacaactaagggactcgcttaagtactagagccctcatcgtcctctctttattttcattaatataaattttacaacattatgatatatagtatcctgcgactgaaaaactgccctgcagttccgtccttatactagatccacccttcagaacttgatggtggcgcagttggtggaggtgctgatcttgtaagggatgttgacgccacatttgccagggagagaggctgcgttgccggcattcaaactctgtcccatattattggcaaggtttttcaggcaattgcaggctgcctggcggtcggcggtggtcttcgccgcgccgctg

SEQ ID NO: 958 - DNA, 385 bp, Glycine max
  Clone ID: 6HA-02-Q1-E1-C3
agaattaagaatgggtttcccttgctgtaacagttaatattttaagacaacaaaaaaggaatggagcaaagaaaggaatacagagagaaccaaaagttctacctccttcccttgttctcccctgcagtatagtgatatctcgtgttgccgcgctttacatttgcttcaaactcaagtcaagttcaccgcctatcgtgttcgtgtgataagcttttcctctcttttctctctttatctctgtaattatggtacagctcaatgacatggtgcagctttgtcattgctatcttgccgtgtctctagagctggttcaacttgagttccatcagccgcatgcccattgcattcttgcttttgcacttttccttttggtgaagcacttgta

SEQ ID NO: 959 - DNA, 384 bp, Glycine max
  Clone ID: 6HA-02-Q1-E1-C4
aatgagataggcagaaacgcaactatattttttcagtagcagcggatcacgttagtataagttttatttttcattaagatatttgaagatcatgacacagggtgaatgtgaaccttcattctccaaaggacaaattgacctcaaaggggggacacctcttattacctgcctcaagagaagcacgcattaaagcgtattcctatcgaagctggcgttatgtaaacatcagacgtcttcacaacagaagaagaaaggaagatacaatgggtgggttcagtattcgaaacgatttccccaaatgagacgatttgtctcaagagaagattggtgtttatcaagttgttaccctgttactagcatatcgtctttctaatcaaatgatga

SEQ ID NO: 960 - DNA, 338 bp, Glycine max
  Clone ID: 6HA-02-Q1-E1-C5
ggcagaaactaaaattgatattatcaagccacattatgtctcaacaaaattcgaagtaacccaacaaaattaggagtaatttgataacctagaaaaacaagactgaattgcagaaacaaaaaacctacatatatgtctccagggttcaaacaaatacaaatcaatcctcatcatcaataaccttggtgcctaaccctttgagctcatccttaggaatctcaacaacggtgacaagagagtatagctcttccttggcatcttcatcgtcattcctcttgcgagcaattcttaccctaatcctccttggaacactcctgattccctggctccagacaaac

SEQ ID NO: 961 - DNA, 204 bp, Glycine max
  Clone ID: 6HA-02-Q1-E1-C6
tttagtacaaaatcgaggaattggcaattagtaattctctccattcataaatacaaaagaatccacctataccaatgcaattttaaatatcgcgtctggtagaaaagatgcaaagtaaatcactgctttcatcagagagcccacactcatatgatgatttatgaatcaatcaatcatcgctctcgaaggtcaacaacatcgaac

SEQ ID NO: 962 - DNA, 371 bp, Glycine max
  Clone ID: 6HA-02-Q1-E1-C7
catggcacaactaaaatataactgattggttaaccaaattgtatcaagtattctgcaacaacaattgaacagagctaacaaacaacaaaagacaaaattcatttggaacacaaacttcctactatccatttttcaatggatttcaaagttcaaaggcagcaaactcttcatatcagtcactttcggcgtcctcgcttctctttcaaatccgcgtcactctggatatggtcaagaatcaaaagcctaggtccaggaggaatcctgacatctctgagagcactgtctgtgagtaaaggcagagtgttgtctgttaacaagcctttcttgaaattcttttcgtaactctgaaggccaagattgttcatcatatg

SEQ ID NO: 963 - DNA, 371 bp, Glycine max
  Clone ID: 6HA-02-Q1-E1-C8
gtaatgcaaggatattttatatggaagcactttttgaaaattcccttgattcttactaattgtaaaaatacccgcagagaggcctggcatgaaattttcacatttaacttactaacacaaaactgagatattaaaaggcagagcacaagtcacatagatagacacttaagagttctatttacaacctgtaagaaaagcaaaaactagagtaattatctagtcacacgtgcgagggatcgaccccaacggacttgagggtctcgacacgatgggtataagtataggcatctccgtgaatgggactaatgatttggtggtgatcatggtagctacgctcttgcacgtgcgccagcttcctgaagaacgatttc

SEQ ID NO: 964 - DNA, 237 bp, Glycine max
  Clone ID: 6HA-02-Q1-E1-C9
gaccaaatgtcatcatgtattaatatgaaaaattaagaaaaacagctacccaaaaacagacaaagcaccagctatgagggaacatattaaaaacaacacagccattcagtactgcccaaaggacaaagacgtttcttcaaaaccctgttccccactttaaagcttccacgggaagcctccaaaaaggccatgggaaaaacccccctaaaaaatttttcccaacaaacttttttccaa

SEQ ID NO: 965 - DNA, 366 bp, Glycine max
  unsure (1)..(366): unsure at all n locations
  Clone ID: 6HA-02-Q1-E1-D1
gaagacaggcaaacatggagaggtttgataggtctagagtacttaaaagcaagcaagcctttgcgaattaaggaaaaaaaaacatggtttgtagcctcataatatcaaggtctaacttgacgaattattacaaaagactctccatactctctcacatgaacttcctgtacggccgaccattatcttcatcttgcatatggaattcacggacgatgcccttgtagacgaggacgggaatagcgatgccgaagatgccaacaagagcaaggttgcggcgagtccaacggaaattgaactccagattctctctggcagtgccccaatcctctatgaacttgttcttgtttgcttccattcctcncccca

SEQ ID NO: 966 - DNA, 258 bp, Glycine max
  Clone ID: 6HA-02-Q1-E1-D10
tgcttacgaagtctgtagattaaattaaaaagtttaataaaaaacaatgcaaataatttggctacagctcacccaacatatgggcagtaaaaatgaagatgaagaaagcacgtcaaaatgtcaaattacacgaagcaaattctacatttacggcaaaaaaaaaaaaaaggcaacagataaaaaagcaaattcttttcttttttaatttcctttttttctctctttttgaactcgttgtctaccttatggatccacagc

SEQ ID NO: 967 - DNA, 245 bp, Glycine max
  Clone ID: 6HA-02-Q1-E1-D11
tacaggcaaatatgtcttatagctgaactaggagtttgtaaagaagccttgtgaaggaagaaaggtgaaaataacaggaagaatcttatcctcaaatccctattccctgacagactttaaagtgaatgcaaagttcttactatgtggtacaaatatcaataacagtggtcttcaattccaaaatacacactactacttatttagtaacatgtaacaaccaaatgcaatgccttcttcaaacattc

SEQ ID NO: 968 - DNA, 340 bp, Glycine max
  Clone ID: 6HA-02-Q1-E1-D12
ttttgcagcatacaatactatatcttcacactacgtacagtacatatgattgtcttcttaggagataactttcagaactaaggaaaaccaaagaggagatgcaaactttttaaaagacttacgtaccaaaatattttggtacatacatgatacatcacctagaatgaaaaatatttatttagatttccttaagtgcatagctaataagaagcataattctttgtaggtgttgtttgtggttgaggcaccattgcagcagaaaccatagtgtttattccacacatgccatgccctctgcagagcttgtaatagccatctttcccccatttccccccccacg

SEQ ID NO: 969 - DNA, 398 bp, Glycine max
  Clone ID: 6HA-02-Q1-E1-D2
tcaaccagaaagaaggtgaatgacaattgaaatgtttttcaaattttttaatttacaatgacaacgcaaccacataacaatgacccaccaaactcacccactcacccaccgccttttacgggtcaatgatccgacccgcgtttcgcatccgttagccatcaccaccaacttgataaacacgaaattaccataacacccttcgttcattcgtttcagatcttgtcgagcttctcgcccttcaccaccggattcgccttcgcgatctgctctctccccatccccttgaagtcgaactcgcacgcgtgctgctccgggtaacggtgggtcccgcacagcatcatctcgcaccgacacttgaaccctgtgagccccacgcgccgcctgcacgtcatacaccg

SEQ ID NO: 970 - DNA, 381 bp, Glycine max
  Clone ID: 6HA-02-Q1-E1-D3
gaaggctgaagcatattcattaaacttgtggcatctgatttatcagacgccagaggcacaaatccagtacaaaaatcccatcacatattcacaccaacaagttgtgtatgttaacataattaaatctcttcaccaaaaaaacagatacaactgggccacactcactatcctctatatgactctatctttccactccaccgcagatgacagtccatgcagaaaccaaaacatcatttatttttcagttttcttaagcttcatagtgaactttaattgagttctcaactactctctccctcgctttagttgcctctttgtgccaatctgttagtgctgttacaatagcaagaataatgacttgtgtaagagagcctgatagag

SEQ ID NO: 971 - DNA, 391 bp, Glycine max
  Clone ID: 6HA-02-Q1-E1-D4
aacaagactgcaacacgagttatttgaatcatcaatcatgtaaccaagaaatagtataaaatccagatgccaccttcatctagaataaaacacttcgaatcatgacctcctgagagctatttcttgaagaatcagcgcacaatctggcagagttgccatatgcatacatggactaatagcaaaaatgcaaaatgtatgaagcataggaaagggaaaaagtgaatgatacacatcttatggattaaaaaccaaagggcaaagtctaagtcttagaaccataatcaataatatccaaatcatttttgaaggccccaatcttccaaaacaaagtaagggttctgcagtaacaggaacttaatcagaatcctcatacacttctccatcatcagat

SEQ ID NO: 972 - DNA, 350 bp, Glycine max
  Clone ID: 6HA-02-Q1-E1-D5
gcttcccacaatagactcctcctttataataaaatcacaggacaacaaagaaaaccagaaaaatgtgataatagtttctgtcaccacatccataaaaaccattgttaagactagtctgactagaatctatacgccaggtcttgaacaaaccaatataaaaggcttacaaaaatatctttgcttaaatagaaaatagaaataacaagcaacaagcaccaaaagctagttctttggcccaatatccttgagggcacaaatctgttcctcacccatagcagacatgacagacacaacaagatccttgccctcagcaaatccatcctttatctgagtgagcagactctcatcag

SEQ ID NO: 973 - DNA, 282 bp, Glycine max
  unsure (1)..(282): unsure at all n locations
  Clone ID: 6HA-02-Q1-E1-D6
aacaaacaatgttacgacttcataaagtgaagcatttcccactaatatcaaatgttcaccatttgattacacgccaaagaggcaaagacctcacccagtataaatgtattatagatatagggaatggactgaatttataattactaagggaatnttagtgccattgctttaatacagaggaaagggaacaagcaacaggtaccaatcgcaaggtttatggcccaataggcatgatggaagtcatcggttcatcatccataacatccatgtcagttatgaaag

SEQ ID NO: 974 - DNA, 167 bp, Glycine max
  Clone ID: 6HA-02-Q1-E1-D7
gtactggtgaacgacagcaacatttcaaaaaagaaccagggtacgccgaaaccatcaaaagcgacgaaaaacaactgggaaaggaccacaagccgtggcaacccccccccaacatgataggatctcaagaacgaagcgctcacagttttagcaatgccagccgggac

SEQ ID NO: 975 - DNA, 395 bp, Glycine max
  Clone ID: 6HA-02-Q1-E1-D8
ttttaaaaccaaaccaatcaacactttagaacaagggttataccctcaaatttaaaattccaattcatgtaatcacccatacagaaccaaatcatttcaagattaaagtcactcaatcagaggtcgaactccattagcagaaaagtgatagttgttaaagtacatattccccagaggatgaactcatattattgcaaacacattagataggcttgatcttgaagtgaagtgaaataagagagaatacaaagcacttcaaatcctgaacaagatagtaaaagatgcgaagaccctcggggtcagcactgctctgaacatcaacaagagacccaatcttcgacgtggtgaacgaaatgtgctcgttccccataacaatctcgagctcctgccgcccc

SEQ ID NO: 976 - DNA, 323 bp, Glycine max
  Clone ID: 6HA-02-Q1-E1-D9
acaaacagcataattaagatacatgtgccttgataggggtacaaatacagcataaactgtaataaaaagaagaaaaggtggaaaaaatgaaaatgaaaaaagatcacaaacagcaatatgagaattgatgcttgatcggacttcaaatatatgaacttattcaagttttatctcttgctgcaactttttcacgctgttttccctagccggggggttaaaaaaccccacaccagttagagtgtggctattaaaatccttctcaatgataaaaagaaaaaaattcatagcagtaacagaaaaagaggaatcactcaatgaaaatc

SEQ ID NO: 977 - DNA, 356 bp, Glycine max
  Clone ID: 6HA-02-Q1-E1-E1
aaagattgttgaattaatacaaaaggggaaagttactacatataaggagagcattgaagctatagacgatgagaaaaagtcagtaacattcaacatcttcgatggagacgttggtgaggattacaagaattttaagctccacttgcatttgattgataaggaggaaggtggtgctatcactgtatggactattgaatatgagaagctgaatgaagatactaaacctccatatcgcttcttggacattatcaaccttgctactaaagatattgatgcccatgctctgaaggcgtagcaacaataatgcaatatagtaaataacttaaacaaataaaaaagaatgtgttcagcatgaa

SEQ ID NO: 978 - DNA, 117 bp, Glycine max
  Clone ID: 6HA-02-Q1-E1-E10
gaatgggcttgggtattaaaaaacacaacggaaagtaaataacaaactaagaaaaaaagaacaagcatagaaataaaggaacaaaaggaaccaaacacgaacaaaaaaaacaaacca

SEQ ID NO: 979 - DNA, 353 bp, Glycine max
  Clone ID: 6HA-02-Q1-E1-E11
agttccaaaaaatcattgattaaaaattaaaatgtttatatatacaataaaaaaaatagatcggtataacttcattgtaagaaatgaaaaagatttcattctacacaagctagctatctaaaattctcgttatttgactactagtactaattcatgaacaagagccattagcccacctatatagaaagaaatagaaagtaaaggagtaaaagaaagagcccttagaaactccaattatatctccctaaactgaatcttttactagggcgtaagaacatccaagacgcccaaagtctaaacaatttctcaaatggaaatcagacatcccgttgtccataaaagacctcaaaagc

SEQ ID NO: 980 - DNA, 325 bp, Glycine max
  Clone ID: 6HA-02-Q1-E1-E12
ggcgaaacgagctcaatacatcatattaaaacataaaaagcagcacctaaaccagaacagcaaacaagttcaagggagaaattgaacataacagacatgacatacaagaacacttgaaaaaagacacgcttaaaacaagaacacttgaaaaaaaacacgcttaaaaaccaccgcgaaggcgaaggacgagatgcaaggtggattccttctgaatattgtaatctgccaaggtacgaccatcttccagttgcttcccagcaaaaataagcctctgctgattaggtggaatgccctccttgtcctgaaatcttgccttcacattatc

SEQ ID NO: 981 - DNA, 384 bp, Glycine max
  Clone ID: 6HA-02-Q1-E1-E2
acaagttacaaacctccggcattgatacaaacttacatctgccttgaatacaaaagcaaaaaactggcaaaaaaacattatcaaggtttaggagagtttactttcaagggaaaatcactttcaatcctccaataaagagggaaatgtatgcaggctggagtcatagacaatgctgataatcgtcaccagtcaatatcccaggacaggtcacttttatttgttcaatcattgccactgtccacaggctcttacagtggaagacaaattcatttggtcttatacttcaaaattcaaactatattgaaattgggtatgcaaactttttcaacttttcctagtgtgtcttgatcatccaccaaaacttgttgagagcatcataactgt

SEQ ID NO: 982 - DNA, 327 bp, Glycine max
  Clone ID: 6HA-02-Q1-E1-E3
ataattctcttgtatttatcatacttacatctgccttgaatacaattgcaattaaacggcaaagaaacattatcacagtctaagagagtttaaattcaagggacaatcacttacaatcctccaaaaaagagggaaatgtatgcaagctaggagtcatacacaatgctgacaaacgtcaccagtcaatatcccaggacaagtcacatgtatttgttcaaacaatgccacagtccacaagcacttacactggaagacacagtcaattggaccaacacttcacaaatcacactatatagaaattgggtatccaaaatttttccacctttc

SEQ ID NO: 983 - DNA, 398 bp, Glycine max
  Clone ID: 6HA-02-Q1-E1-E4
tttgttaatcttaaaataacttggataacgataagtttcaactttacgtacccaaaaaaaaaactaacataacattgaagatttcaacacataagccagtgttgcatcggcttgttaaattggaaaaggacgagcataattctagctcatctcttctccctcacaaacacctacaagaattgtagcaaagaaaaagaacacaaagttacaagatgataaaaataagatgagaccacacaacctatcaccccattttccatgtcatggcaaagtttttacccacaacgatgttcaagcccctcaaagcaaccatcacagtcttcttttctccttctccctcattgttcaagtgctcatgtgctgatgtagtaacattcacatttgagccaccacccatt

SEQ ID NO: 984 - DNA, 361 bp, Glycine max
  Clone ID: 6HA-02-Q1-E1-E5
aaggaacagctgatttatatgcttaatcttaaactgcaccaaattaaaatataaaggaaggggggtttcactcaaaatgcaaaggaagaggggtttcagtcagataccaactcatcaaggagtaggaagaagtaagaatataccaaaattcaactattttgcataaatccttaacatcatattgtcccccatatactatgaatggtacaaaatgatttcagattcatcttttaatcttaccattatattctgctcaccctaccatccgaagttagaccgcagttttgacttcatattcatcatttaatctttcgaagttatcacgagcaaccccaaagcaccaatgagaatatacttgata

SEQ ID NO: 985 - DNA, 388 bp, Glycine max
  Clone ID: 6HA-02-Q1-E1-E6
tttatttgggccaaaagtatatccaatccatatacaactttattagcacataaaactcatattttatgaaattattggaaataggttgtcacacttggtttattttaacatttctggttgatcgcaacacagactttttctccaaaagcaactcaagggtaagtaaacactcaacatcatacattgaaaatacataaatatatgcataaacaaagtgactaattagtagtgggaggaatgagatttgtggtttccttgatcttggatatgaagaggctttgaaattctgaatccacgtgaagagatgcttgttgcacagatggtgacaaggcgctccaaattgatgcccttccacccaactcttcaaataaaggctttgtagttgtca

SEQ ID NO: 986 - DNA, 394 bp, Glycine max
  Clone ID: 6HA-02-Q1-E1-E7
ttttaataatgaaaataacgcaaataacataatgcttaaagcaacgttcatatcagaagggaaaaatagtttgaatcccatccaacaaaaatcatgcgattaaaatccaattaaaaaagcataaagtaaaataagtttttaaaacaggtatctggaggaaagcaactacatttagtccacttcctcaatcttggggccagcaccacttccaccagaaggaggagcagcatactcatcctctgctgcaccagcaccacccacgtctggaccagcaccaccttggtacatcttggcaatgattggattgcagatgctttccaattccttcattttgtcctcaaactcatctgcttctgcaagctggttgctgtctaaccactggattgcttgctca

SEQ ID NO: 987 - DNA, 381 bp, Glycine max
  Clone ID: 6HA-02-Q1-E1-E8
ttttcgaaaaaaaaaatccacggttttaattattataaagtatcaaagcagaactacttgtatatgtatattatatactgacatatccccatccaacttgttttgcgcacataagctgtcaccagaacaataaagatattttcttcgaactcatggcgtatttctgagtccaagaacgggcagtgctctcgtacttgtctctgtcagtcttgtacatgtgagcaatatcaggcaccaaaggatcatccgggttgggatctgtcagcagggagcaaattgaaagtagcaccttggaaactgtaagggcaggactccactgctctttcagaatgtccacacagatacttccattgctgtttatgttacggtgaaataacttgg

SEQ ID NO: 988 - DNA, 339 bp, Glycine max
  Clone ID: 6HA-02-Q1-E1-E9
aattcataatgattgtagatatcattgatcataggaaacatgggaacacttaacagctatcttgtttattattttgtttaaaacgctgcttgatgcaaattgtaaatctgctcactcaccacaagactttggtcaatgcaggccaataaagaagaacaaaaaacacaagaagacaagttaaacagcttcatcttctttgtagttcacggcttggtcccaataatgaggaacaccagcatccacaaaaacttttcgggcagctgcttcggtgatgcaatcatggacactgaacctataaaagctgggtttggaaaaattccttgccacaccagaacacac

SEQ ID NO: 989 - DNA, 381 bp, Glycine max
  Clone ID: 6HA-02-Q1-E1-F1
cgagataaagcaataaaagtttattgatacatttaacggaaaactttcaacttccccagtattaaaccctcacaaatgacataaagcacaacacacagcataaacacatacatggaacaacatacagtaaagacagaacagaacacacttgtttggaatgagagacagcaacaaccaattaaagatctaggcagatatttgaattgacttgacttgaggtttcttgtcttcctccttgggcacagtaacagttagcactccattctccatagcagccttgacctgatccattttggcattctcgggaagcctgaacctcctcatgaacttcccagtgcttctttcaacgcggtgccacctatcatctttctgttcttgttc

SEQ ID NO: 990 - DNA, 348 bp, Glycine max
  Clone ID: 6HA-02-Q1-E1-F10
aaacaattcacaccatgattcactatagttgtaatataagtgaacaaacattaaatccacagtacaacagtaaaagggtacacatttaagcaaacattgacttgtggagaaggtttcataattcacacggtatctaacaaactagaaacagctgcctagactaagagaaggctagagttttccactctcctagcaagtcattttctagtagtaaccaaatgctttccctttgagaaaattaaagactgactactcaaataccaaaatacttccatcccatgagcatgaagcaataacattaggtataacagggtggaaggcaacatctatgcatgcctggtcatgggc

SEQ ID NO: 991 - DNA, 239 bp, Glycine max
  Clone ID: 6HA-02-Q1-E1-F11
tcttttttttctattttttttattttttattatttttgttattttttggttttaatattatatctataggaaaagggtaagtgggcacatattgatgcagacactgaattgtggataaagtttcatagttcatatggaatcaaacaaacaacaaacagatagaaagaaaacaagaacgttatacatatccagctccgagcaagacatattaactagataacaacagacgtatattctga

SEQ ID NO: 992 - DNA, 352 bp, Glycine max
  Clone ID: 6HA-02-Q1-E1-F12
ttatgataaaattaaatcaaactaaattgtgcaatatcaataaaaacaaagaaagaaagaaaaatacccgaagaataaggtgttatgataaaagccaaaaaagaaaccaaaacggcgtgcgtgcgaatgaatcaatgagtcgtaactttggacctcttcttggcctcactgtaaagcaccacccccattatggtgattccgaacccggccattcccataaccgtcaccggattcctgaagatcaaaaccgaaaccaccgccgccaccgccgccttggcattccccaacacctgcagcgtcaaagcactcgtgtgcttcgtcaccaagaaattcgtcaagttcaccaaataag

SEQ ID NO: 993 - DNA, 343 bp, Glycine max
  Clone ID: 6HA-02-Q1-E1-F2
atgaaaataagaaaattaaccatacaaactatatatgaatgaccaaaattgttttaaataattctaatcttaaccataaattgaaattatatgattaaattcactcctctcatgctttcatctaacctgaataataaactagatctgaggataaaaaaaatgtgtcttaatcagattattgaataatctttttcctcatagcaaatcaaacacattaactttgcttgactcttagaagtataaatgatacatagagtttttgtccctcgtcatataaattcaatacatgaaaaatgaatctcatcccaggttttcagcaacacaacatcatgttggggctttg

SEQ ID NO: 994 - DNA, 398 bp, Glycine max
  Clone ID: 6HA-02-Q1-E1-F3
aaaggtagaatattatcccacaaaataaatcagaattcaatatattttttttacagtaagccatggttaaatatgaagacccggcagaaaaaaagataatctacagtaacgaattcttgatctaacctaacaagtcaacaatacatatgatcatcatattaaccagtgaacctggctcccggcaggtaagacaactgtaagaaactcgaatgaatgtgacgccaaatccaagcgctcattgtgttgctcagtttagccactatgcctacacctggagaataaacatgtattacaatacaattagagaccgaaagaagacaaagcaaagtaaatattgaatgcatttgatgaacaaggaacttggttaagtgttctacagcagaagacatcattcgtgc

SEQ ID NO: 995 - DNA, 392 bp, Glycine max
  Clone ID: 6HA-02-Q1-E1-F4
aacaatccaaataaaatatattaaccatataaataaaaattgcattgcagattggtgcaatgtctaagttgacagtgcctatgattctaaaagcaaaattgtatttatatttatgtactagaagtctagtataccttattgcaacatcaacggtgggagaaaccaactaagattaagctaatgatgacgggtttggataggattcaaacctcatttccacaatgaaatataaaataaacaataaaaccaagtttggagaccccctttttgctttcaagacctctctctgaactcttttagataaagtactactgacaacgaatatatgtgatgttagaacctaaatcaggaattttatttccacagctttacatagttgtcataacttgcag

SEQ ID NO: 996 - DNA, 368 bp, Glycine max
  Clone ID: 6HA-02-Q1-E1-F5
gatgccaggacttagtttttatatatttatattagataaataacaataataattcctgaccatgctcgcaactcacagcatgtaatgtgagatttagtgagagaagtagtcccatgattaaaggcacaaaattatgtaaaaatttatagggtataccctgcccaagtcccattgcaacataactttttaaataagctaggaacttgccccaaatacacgagattctctgttggatttgaaccctgcagcaaggacaaatagccttaccttttcttccatactcatcactgcaactagcacacataacttggtgtgcgcacggcaagaaaacaatggagacttcatctttcatacatacaatgcattct

SEQ ID NO: 997 - DNA, 371 bp, Glycine max
  Clone ID: 6HA-02-Q1-E1-F6
gtcaacaacataatctctaacagactttctattattgactaaaatttattaaaaattacaaaattttgtgggtctcactttttaattatttagtgagtcttaaggttgtttttgtaatttccaattacagagagtctgttaaaagaagtatgtaacaaaatgtgtggccaacacttctcttcagggaaaatgccatcctcttgattaagtattgcttcaatatttgaagtaatagtgatcttacctgatgcattacccataagctttgtgtctctaaaaccaatagttacagccaaacacaagagcatcaacaaccagttgatctcagggatatatacttgtccatggattttggatgaagtgtgaaccac

SEQ ID NO: 998 - DNA, 293 bp, Glycine max
  Clone ID: 6HA-02-Q1-E1-F7
caactgaaaaagttcacccttaaattagtaaattacatcctccgtggctataaatgtgactctggaagaattaacttacgaatcaagataaatgtatcttgaaccaccaaactacatccaacattgaaccctaataccctatgacaaattgcaaaaagcaattcatgttcctcagaatatttatagaaaagattcagggattcacttcgttaagggagtatgccttcacaaacttcagaaggttattatatgattaaactctgccgggcgataaacttgttaaaaccacattt

SEQ ID NO: 999 - DNA, 370 bp, Glycine max
  Clone ID: 6HA-02-Q1-E1-F8
attattatattctattattgaacgtggtcacaccatatataatacacattattgaaatggatgcacatgcttgcttgtgctaatttccggatagctatagagccatgcctcactgatcacttacacacataagagaaacacacatgcaacccgaaagcctaaaacaacctaaacatgctagctaaatatttcacgacacacatgacatgacactttgacctatataactattgcctaaacattattttttataacctagtcctttcctacttcctaaaacacttgacactcacatttaagctagcataagaacacactagacatgctactgaagggtgttacattatcacttatcctggtcgtcgttctg

SEQ ID NO: 1000 - DNA, 342 bp, Glycine max
  Clone ID: 6HA-02-Q1-E1-F9
aatagtaataaccaaagcatgtttaaataaacaaaagggtatctagatggtagacacagaaatttacgagttttcttttcttcaataacaaccatcttataataagtaccccaaaaagagaacaaccactttcctctattaggcctaatcgatcaacatcttttctataccttaatttcatccatcaatacaattaaccgcataaaagtcatctcccctaaatctaagtggaaaaatgtttgtgttgatcctgcagctgttgtttgtgttgaagacccatcaattcaaaatccttctggggaatgagcaaaaccaatctcgcattctcaaacctcctgcgtt

SEQ ID NO: 1001 - DNA, 286 bp, Glycine max
  Clone ID: 6HA-02-Q1-E1-G1
aataatcaaaacaaaccagagtgcgaataaaattaacagacttcaattcaaaaaaacaattgcaatagcggtgttttaaaactcatgatctccataaagctaagggtgcagaacatcaaacaaaattttctcacaactataatatgaattacaaactgtcttctcaaggacctcattttttggcctctttccctgcttctgcggccttctttaagggcccaacgtaatggcgtttggtggggccttcaaaaccaagcttaaaaaaagccttgaatgccttcaattc

SEQ ID NO: 1002 - DNA, 368 bp, Glycine max
  Clone ID: 6HA-02-Q1-E1-G10
taattaaataacagcatagcttctattataaatcatgtctacagacaaactattgatctataaattcatttctatagctttgtatatatttcttctccgttcccctttgcctataatgatttaggctaccctccatgtgaactacccttcttcccaagacttttataagtcctcttaattctcaatacatgctcatcttttctatcatttgaggcaaatttctgtcatcttttctaccttataaatgattgacgaaatcatttctgacaagaatatccaaataccaaatctgacctaggaactaccacaactttttctgtaatgtacgtattcattatcaaaaagataaaagaaagaaaaagaaaaag

SEQ ID NO: 1003 - DNA, 365 bp, Glycine max
  Clone ID: 6HA-02-Q1-E1-G11
tttttatatgaataaatatcacatctaacacgttttcacaaatgaaacaaattgttttttaaagactaaaaacaaactttaccaggacatcaaataaattgggatatattatcgcttagacggaacaactacagatcatttgagatatattatcacataaattgggaaagttgacacaatgatcctatatttacaacaaaccactgaactgtgtctggaagtgcacaagtccagggtacggtgatcaacaggttagttagtcaaccaggctagaaccaacaggatgagcttgccaggacatcaacttcacttttcttcaacaaagaaaacatccctttcacctgtttcccaaattgacgaaccct

SEQ ID NO: 1004 - DNA, 337 bp, Glycine max
  Clone ID: 6HA-02-Q1-E1-G12
atgcaagtaaacgactaaaatattaatgattaaggttcctgtacaaatactgtacatccaagcgtgacccttgaaaatgccctccatgtctctatagctgatactagtcaatcaacttaaactatcagcgtgctatgtacacacccccaacaatttttgtagtcaagtgacgatagtagcttcatccccaagtaactcgtgtggccaccactgcaataaactcctttagaccactgccagcaagtcactagcacccttatctacataactatcaattaccctaataattacatttggatgattcaaatatggaccattcaagagagtgcaattatga

SEQ ID NO: 1005 - DNA, 391 bp, Glycine max
  Clone ID: 6HA-02-Q1-E1-G2
aacataagagttgagaccattacattctagtattgaacgtggtcacaccatagatacatacacattagtgaaatggaggcacatgcttgcttgtgctaatttctggatagctatagagccatgcctcactgatcacttacacacataagagaaacacacatgcaaaagaaaccctaaaacaacctaaacatgctagctaattatttcacgacacacatgacatgacactttgacctatataactattgcctaaacattattttttataacctattcttttcctacttcctaaaacacttgacactcacatttaagctagcataagaacacactacacatgctagtgaagggtgttacattatcacttatcctggtcttcgttctgattctg

SEQ ID NO: 1006 - DNA, 389 bp, Glycine max
  Clone ID: 6HA-02-Q1-E1-G3
aaacagtaaaatcttgatactatagaattaagtcatgataaatcatgtcaaaacatagatagacaactcgataaaatgcgcaacaacaaacaaaatctctgataggagtcgaaggttttcctcagaaccactacaaactaagaagtagctttcccaataacagtcttcacttaagaggaataaacctggatgagtgagtagcaccaataccaggtctcccgtgcttaacgggtttgtatgaaatagaaaactcagcaagataatgcccaatcatctcaggtttgatttcaacctgattaaaggttttgccattgtacactccaataatgctaccaatcatctcaggcacaataatcatgttgcggaggtgggtgcgtactggttctggc

SEQ ID NO: 1007 - DNA, 382 bp, Glycine max
  unsure (1)..(382): unsure at all n locations
  Clone ID: 6HA-02-Q1-E1-G4
ttttcctggggagattaacagtagcatcttattaaattcaagtaccaacattaacattatccgagcgaatggaccattctctcggatagcgctggacccacaaccttcctgtatctccgcaatcgtgactccaagtaactccgctgctcaggatcaaagacaacccacagatccttgtatttcacatgagatccctttatccctagcaaaaccttgctgacatcaacaatttctggatcatcatctgaagtggtttctacgtcaggttcatcatcagagcattcagattcagaatcaaccatttcttctgcatcaagcattggaacatcatttgcatcttcttggacaacatcatcaanatcccttctcattacatcgtcag

SEQ ID NO: 1008 - DNA, 340 bp, Glycine max
  Clone ID: 6HA-02-Q1-E1-G5
aatccatggaactatatatacacaattgaattagaatttgtgattcaggtttccatttacaaagatgagtatcattccaacactcaaacttagaatcatcggtacaactacagtaagacatacaaaaatttgctcaaatgatggttcctttcctcctacctagggaatgaaccaacacgcctacttgaagggggcatcgcacaaaacactcggattgaaattttatcttcaggggggaaagcagacccataaccttttaaatccggaactcttgcatcattgtttagtgagtcatgattcaactatatgcatttgtaattgaccttaattcaagggaatt

SEQ ID NO: 1009 - DNA, 219 bp, Glycine max
  Clone ID: 6HA-02-Q1-E1-G6
gaaccaaaaccggttttcaaaatacattccaaaaattaaaaagtaacacgtaaattaaaatggcatgaaagaaagacacggtttaggaggatcaaagctaaagaggatccactaagtaaaaaggtaaccctacattattattacaaaacacaagatgtgattattactattaccatgatggatgaaaagggaaatcaaattttctccctacgacgctcc

SEQ ID NO: 1010 - DNA, 378 bp, Glycine max
  Clone ID: 6HA-02-Q1-E1-G7
gttcttgcacaacttgtgcgcaaatcatgtgataactcaattttcccacaaagcgaaccacagataggtaggtataacaaggaagcatgatgaatgaaaaagatgggatatgttttgggagcatgacaagtttaaactcaagtaaaaatcctgctatgcaccagtaaataaatattatcatctgatgacctgtgaattaaaatgaaaaataccattttttccagctaaatcaaagataaggttaagttttccctagcacattatctacatatgtttatagtctgcattgcatgtaaactatcagctacagcttctgctcgctatgtagtatcgaccttcccaaccattcagtttgacattcacaactgattccagtgc

SEQ ID NO: 1011 - DNA, 367 bp, Glycine max
  Clone ID: 6HA-02-Q1-E1-G8
aacaagtcagaccatttcaaaaatctaaaatgtctaccaacacatataatataacaattataacaaccgcacggcctaagtatcattagccattaataatttaatcttcgtcctcctcatctccatctccatcagcaaccttcttagcagcagccctttggttctttctcttcacacgtcctggacgaccaccaccatctggactggtcagtgataagtcaatgtgcttcagcgattcaaccctaagcatgaatgatgggatgttcaccatctgtctctcaatcctgatgtgcctctgcctgatgacgactctggcgtggtggatggacttggccatgccagacttgaaaacgacggtttggatgca

SEQ ID NO: 1012 - DNA, 179 bp, Glycine max
  Clone ID: 6HA-02-Q1-E1-G9
tttgagtattactaaatactagcagcattttaatcaatactgtattctatcttgacgtaatccctcaatctgtagcagtcacgcgcgactactacacagcattcagtttcttcttcgtttttgctttttttttttttattttctctcaaaattgcgattgcgtggttgtggaatctgca

SEQ ID NO: 1013 - DNA, 398 bp, Glycine max
  Clone ID: 6HA-02-Q1-E1-H1
aaaatttcaaaatatcttcataatctatcagagcaaaaaaatattcaggcactaaattagaaatttgttcaactcatccggatctaataattacttcaagtgcccttcccttctgtatgattatgattataccaccaaacgaaagatccatatcatgcttacaccccaggaaggatatactgcaaatacaccattaactcaatttcatcgacgcaaatttttctgccagatctataacctcgtttacatgtgatgcctctgtaccctgacccgttgcaagaccaccttttcctttaccacatctcccttttagaggccccaaagcattactcagccaatctgccacatccagattacctttacctcctttctctggcaccccggcacacactacagcc

SEQ ID NO: 1014 - DNA, 231 bp, Glycine max
  Clone ID: 6HA-02-Q1-E1-H10
gcccataaaacatcacattaacaaccaacaattcgcaacagggcattaacaaactgttctacacatgtaacttcaaaatcgttgtataaaattcacaccctttacttatttataaacacaaaccatatattgagcaccaaagtaaacttgtttaacttgtcaaaagaaaacttccccctttgatgagaacaaacacactgccaccatcaccccttgaaaaacctaaatcct

SEQ ID NO: 1015 - DNA, 266 bp, Glycine max
  Clone ID: 6HA-02-Q1-E1-H11
taaaaatttaataaacccctgtttgaaagttcagtaaataatatccattcaactaaatttgagaaaaaacaaaaagcatggagatatataatatgtccttcaatagaaaatgaaataacaaaaggtagcaaaacatataattactgggtcctagcatgcttaagacgaggcacaatcatccgataacatcaaaactgctgctgcttctgctaactcaagcctccaccctttcctcctcgaggataaaggccttccctgttggcttt

SEQ ID NO: 1016 - DNA, 303 bp, Glycine max
  Clone ID: 6HA-02-Q1-E1-H12
gcacaaagaaaacaaccattttaattatttaatactaaatcaaatcattacatcacctttctccagattagaaatgcatttgcaaatgacatcgtattgatgtaaaataaatactgcaatatgtgtgctcccccaatcacgtcccgcatcaaatgggcaaaagacttaagcaagaactcaaaatgtgttaggctaacgtcaattcccttattgatgtctctccaaaaacttctctattacgactgagaatgccgcaaagccagcacaaccagcacacgctgcttttgggccaccttttgctga

SEQ ID NO: 1017 - DNA, 347 bp, Glycine max
  Clone ID: 6HA-02-Q1-E1-H2
acaaaatgagccaaagtgtccatcaaagcagcacaaacacactggagctaacaagtggatctcccaaccaacaataaatgttttccctaatgatgcccttgccatcttgacttggatcattttaatcactaaaggacacctaaaaaaccaggaagacaacatatatgaaacttacatatagaagatgaagcttcaaggttcatacattaaccttcagtagtgcatgcctaaattttgtcgagcttatctgccttaattatggggttggctttagctatggcatcctgaccaacagtcctataatcaaaagggcaatcatgtttatcagaatagcgatgcattgcaca

SEQ ID NO: 1018 - DNA, 387 bp, Glycine max
  Clone ID: 6HA-02-Q1-E1-H3
gatacattacaaatacacccgatctcctttctcttaagaatttccaagaatatcgtatatgattatcaacaaataaagaaggtaggaaactttttctccagttgccaaactccccccttctaagcagattcttgctaaagcttttaagaaattgctctttaaacatcatttaaatacctatccataaactttcatttgtttctagtttgcgcagttgaatccatggcaaacagaaagccagataaccaggaccaaaagcaacaaaattccaagaacaaccaatttgattttcatgttctgataccacatcttccgacggacatgagttccttgctttttgaattcctgggcttgtgagtgcaaagtctctgtcttgtccgccagaat

SEQ ID NO: 1019 - DNA, 405 bp, Glycine max
  Clone ID: 6HA-02-Q1-E1-H4
taatcaccaaaaattatgttgatgctgaaagaaaacttgtaacaagttaacactatcactgtaatatttgacattcacaaaatccagcattcttccccattgtattaaacaattgtcctgaaaaaaaaaggtgaggggttgattgctggtatataacattaatgaatttagatgacctgataggttactatgtccacagtaaaaaattttaaggtatgattcaaattcactaaaattttcctctaatcaagatctccttttgagaccttggaattggccagctgagactacaaatcttcattgcactcgcagaagttatcatatacgtgtttggatatggatgccgatatattagacagtgactaactgctgcaaggatcatagatttcttggataaatttcaac

SEQ ID NO: 1020 - DNA, 374 bp, Glycine max
  Clone ID: 6HA-02-Q1-E1-H5
aaaccagaacagcaaacaagttcaagggagaaattgaacataacagacatgacatacaagaacacttgaaaaaagacacgcttaaaacaagaacacttgaaaaaaaacacgcttaaaaaccaccgcgaaggcgaaggacgagatgcaaggtggattccttctgaatattgtaatctgccaaggtacgaccatcttccagttgcttcccagcaaaaataagcctctgctgatcaggtggaatgccctccttgtcctgaatctttgccttcacattatcaatggtatcagaactttcaacctccaaagttaagggttttccagtcaaagtcttaacaaagatttgcatgccaccacgaagccgcaacaccaagtgc

SEQ ID NO: 1021 - DNA, 385 bp, Glycine max
  Clone ID: 6HA-02-Q1-E1-H6
atggtaagcggtaaatatatgttatttttttttcatatatagaaatgttagaagtaagaagttgctatgcaatttaacgaatgactttaatatactctgaagttgcaattaacaaagtttcttaactttaatatactctgaagtctcccctgttccacaatgttgccagcttgagaaagagcttcctggctcttgccagagagcttagccaaggtgacagtgtgaatgcctccaatcacagctatcatagggacaacagcaagagtcaccaaagccaattgccacacagcagtgaaacccacaacaaagccagaaacaaaggtggccatgtagtgaatgaaattccccaacttctcactaatggcatcctggaccatgatagcat

SEQ ID NO: 1022 - DNA, 385 bp, Glycine max
  Clone ID: 6HA-02-Q1-E1-H7
gaaattgaatctcacaatatgcattaaactgatatcactctacatcccccgcaagggaaaacagggcaatagatccaaataaataaagttttttcggctaagttccaaataaattgatgactactgaaaattctgcagctacttgtggattgtaaatagtgtgtttcccgacacaaacgatatttcctcttttctttttcgttaagaaaaatctccaacaaggaaaaggatgcaagaaagcttgctaagctggctacagcaatgaaaacacagctctagtccggcttattcattctccaacggtcaaaccaaacccaaatttgtagtcttttttcctgtggtcaagctctgcagaaagaataaaattcagacccatatttaaccg

SEQ ID NO: 1023 - DNA, 390 bp, Glycine max
  Clone ID: 6HA-02-Q1-E1-H8
catacacttgcatgcttagcaattggaagtatagaataatcaactattgtctaaccggccaaattccaaacaattcaaaagcagaacatatagacgaaattggcaaaatgtaaaaaaacagagataaatgggaatgaaatagagttcatatggcagtagatacacgaatagcagcaaatgtaaatcagtgatggtatagatcggtgccagtagttatcatcacgccattggtaattaccatcagagcattgcccaagattgatccagctactattcaacatactgctcctcaccttcatcctcgtattcatcatcctcctctgcggttgcatcctggtactgctggtactctgctaccaaatcattcatattactctctgcctcagtgaa

SEQ ID NO: 1024 - DNA, 355 bp, Glycine max
  Clone ID: 6HA-02-Q1-E1-H9
tttcaagtcgaaatattaaatatttattcgcactataagagatcccgaatacacaatctcgatcggttcattgcattttataaagttacacaaccacaatttgagtgtcacctagaaggaggccaacataaatcataactcaaaatagctagaaacaaaaaattatgtttaagttacaagtcgacgaatccatttaccttaacatatcaaaatcaaacaaaaaaatgatccctttgagagtgttcagtgctcactcggctgcagcttttgcagtccgaaaccctttcttcaattcggcgaatcttttcatgcaagcagccttggattccccgggaaccgcagcagcaaccttttc

SEQ ID NO: 1025 - DNA, 2236 bp, Glycine max
  Clone ID: LIB5-01-G6_FLI
attcggctcgaggataagtatgaagaataaaaacagtcgagctaatcggaaagctcgttcggtgaaaccccccgattcctgtttatcttcttccaattcaaacaagaaatggatggttccctataaattctacgatgtcaagggtcccaattccgagtcaaaccctaatgttgactcgtctagttgggttttgtgcaccgaggttcaattggaaaccattctgttgaaaaacattgaaattatatacaatgacactgtgccaaagcttgttgctttgggctacagtgaggagattgctgtcaaagcgattctgtacaatggacattgttacggtgccaatgatttggcaacaaacgtgctgcacaactccttggcttgtttgacaacggggaccttggacttgtctgagtccagccctgcgttccctgatatgaagaagcttcaggagtactctttgatgaaccttgtgtctttgttgaaagaggtgaggcccgatttaagtaggggtgatgctatgtggtgtctcctcatgagcaatttccatgtgttgaaggcgggcgccatcccggttcctgttggaaacacgtgccctcctcctcctcctcctttgcccgagcttgagaacacgggatggagatttgcgaaagagggaggcttgggttttcctttgaatgggctcttttctgatactgatatgactatacggttacagagagatattgaattcccaaaaagatttgaccttactcctgccatgaaaagcttgttgaaaagaaatgttgcaatgtttgctgatggttttagggctaactcaaaacaggtgcagccgcaagccagtgaatttcctaggactggctctgtttcgaaattgggttcttcatctgcttctgggactgctgcagtccttggtgagcagcctggtgactctcacaatcagaatgaccaggaggacttgaactctgtgatgagtaaatttcttgatctaaatattgatgataatgtggagtttgtgccagaagacgacaaggaggaggtgatagtcactctagttaatcagataaaggatcttgagaaacaggtcaaggagcggaaagattgggctcatgagaaggcaatccaagcggcaaaaaagctaagcagtgatctgattgagctgaaaaagttcaagatggaaagagaggagaataaaaaactgccgaaggagacaggggcagctgaggagctggacaacccaaccatgatgagactctcagaaatggagaatgccttgagaaagactagtggtcaaatggaccaagcaactgcagctgtcagaaaacttgaggcggagaaagctgaaatcaaagcagagttagaggcttctaaattaagtgcatcagagtcagtcacaagctgtttgcaagttgcaaaaagggagaaaaagtgcttaaagaagcttctgacttgggaaaaacagaaagtaaagatacatcaggatatttcagatgaaaaacagaagatattggagatacaagaagaactagctcagattaaacagtgtgcaaaggaaactgaggtaacgaggaaggaagagttgaaggctaaggaagaagccttggcactaattgaagaggagcgccgttctaaggaagcagctgaggctaatcataaaagaaatcttaaagctttacgcctgaagatagagatagatttccagcgtcgtaaggatgatctccctaaggctgaagcagagattcacgccctaaaagcacatgcacggtctactactttgcctacaagtgagtctgaggatgcagagccccagagagagacacttgctaagcttctgctagagttagataatgtgaaggatttttctggaaaagaaatcaacggtgatagagaatgcattatatgtggaaaggatgaagtttcagttattttcttgccatgtgcacaccaagttatgtgtgctcgttgcggtaaagagtatgggaaaaagggtaaagctgtttgtccatgctgccgggttccaattgaagagagaattcctatatttggggcatgttcgtagtcttacatcggtaagctatgaatattttgcagaaaaactatgttctgccgtagcttatcttttgaatgtctgaaaatgaaaatctattattactaccttgaaaataagataggtaaatactaacatgtgctttgaaggcactagtcaaggattaaaaaatataaatgattttaggatatgagt

SEQ ID NO: 1026 - DNA, 1512 bp, Glycine max
  Clone ID: LIB5-02-B10_FLI
attcggctcgaggtctattctcattttctctctctgtctctttgctccatttcagtgctctgtcttctcccccaccaccgcactctctcagatattatcatttcatatcacacattcacatcctatcatcatcgacaacacgctatccccattgcttcttctcttctccctctctcgtttcctacttgacggcgccgtttcgttctccagaagatgcttctgagtacttcgcgctgcaactagacatgatgagttcaagtttcaagacatgggctgtgggatttgcacttggaaatgaaggagaggcaacgttggagagctgaagaggatgctttattacgttcttatgtcaaacagtatggtcctagggaatggaatcttgtgtctcagcgcatgaacacatatcttaacagggatgctaagtcgtgcttggagaggtggaagaactacctcaagcctggcatcaaaaaaggctctcttactgaagaagagcagcgccttgtcatccaccttcaagcaaaatatggaaacaaatggaagaaaatcgctgctgaagtcccagggcgcactgctaagcggttaggcaagtggtgggaagtcttcaaagagaagcagcagagagagaaaaaggagatcaatagaattgccgacccaattaacaatagtaagtacgagcacatactcgagagttttgcagagaaactagttaaggaacgcccttcaccatcatttgtcatggctgcttccgatggggcatttctgctcactgatacaccagcacctgcatcttccttgcgtccttcttggctttccaattctagtagtgctgcagccatcggcccaagttccctttctgtgaaactaagtctttcttcctcaacggtggccacacctccattttcatggttgccacccgagagaggaccagacaatgctccttttgttttggggaatgtatcagcgcttcatggagctattccaactctaagtgatagcatgcatatgtctcagatggtggagcactgtaaagagttggaagaggggcatcgtgctttggccacgcacaagaaggaggcagcttggaggttaagtcgggtggagttacagttggagtcagagaaggccaaccgaagaagggagaagattgaagaatttgaagcaaagattaaagctcttcaggaagaggagaaagctgctttaggtagaattgaagcagaatacagagaacagttagctgcattgaggagagatgctgaaaacaaggagcaaaagttggcagaacaatgggatgcaaagcatttacggtttactaggttactagagcaattaggatgcagagcagggctccttgagccaaatgcaagatgaagatatattttggcaaaatggatattggtgctcttctgactaaaattatatgcagtttgtgatcttggtatatttttattttagacgtgtatgaatttcctatctattcatacaacttgagtaacttccgttaacagttgaatt

SEQ ID NO: 1027 - DNA, 588 bp, Glycine max
  Clone ID: LIB5-01-F10_FLI
attcggctcgagcggaggaagaagaaagcggagtatcgatacaactggaattcccgaagggtcgggtgaagaagattatggcgctggacaaagacgtgaagagggtgagctcagaagcgttgtttctggtgtcgcgctccacggaattattcctccaattcctggctgaaaaatcggcgcaggttgcgattgaaaagaaacggaagaccgtgaatctggaacatataagagaggccgtgaagaggcaccagccaacccgggattttctcctcgacgagcttccgccgccatctcagcccaccaagcccgataggcccactcagcctgccggtcggcccaaattggatcctcctccccgtggtactcgccgcatcgatctatttttccggaaaccagaacttgacaacccagcccaagcccaaccacctgaaaatccagctcaagctcaaccgcctgaaaatccagaccaagaccaagcccaatcgccagtacccgtagatgagtcttaggttttgtttgtttatacacctgcgtttgagattttgtatccgatctgaatctgagataacatctaacaatgcattagcg

SEQ ID NO: 1028 - DNA, 1014 bp, Glycine max
  Clone ID: LIB5-02-C9_FLI
attcggctcgagcaggcgtttggttgaatggaagcgcgtgggcgggtggttcgtgtttccgttcacaacagtgtcaatgtcctcctcccttcttttcccttttaagtcatagctttccccttcccttcaaattctcctcaaaccctacctccctttccccccccctcttcgcgtcttttcgcaaccgactgcatcttggatactggaatagtgtgccaatatgagctctcgggcaggcaagggacctgccgtcagaagttatcggaggagaaagacagcgttggaccttgaccttaaccgtgtaccagctggtgagaatcgtgagcaggagggaccttcgactcagtcggtgcctcgagaagttcaagttgaacagcagcagcaggctactcaacctccgatgattgacgtggaagccattgatgatgatgttgttgaatgtaccccaagggcttttgctgaggctaaaaacaattcaagaagagttcgtaggaggactatagttgatgttgatctagaagatcagactaggcgcaacaaacgccgaagagaattgccaaatctgattattaattgtgataagtatataaatttggaaggcggtagcagttccatggagcaaagttttaaaaagccacctgaacctccaaaggagcttgtcttcaactgtccaatatgtatgggccctatggtacatgaaatgtcgacaagatgtggtcatattttttgcaaggattgcatcaaagctgctataagtgctcagggtaaatgccctacctgtagaaaaaaggttgttgcgaaagatcttataagggtgtatctcccatcgactagttagaggctttccgtggaagctgtaaagaggagacagggattggaagaaacgtcattgtactttggacaatactgaatggctgtgttgtttctaatatgttccctcatagctgatgcttagtctgttgttgggtagctgtttctcttaatttatcatattaatacatgatgacatttggt

SEQ ID NO: 1029 - DNA, 203 bp, Glycine max
  Clone ID: ASG3244V4L-01-Q1-E1-A1
gatgtttgtaaaaaatatgtaacccaaaaataagcatgttaatcagaagcaaatccttaggctgtatcatacatctgccacaatgcacttagcccaaatcagtccccaagtccatttagagtatgtttgtttctcccttgtcacgctttcttatgcacctcaacgtgactgaaccaaaagcatggattgacgtttaaatggat

SEQ ID NO: 1030 - DNA, 336 bp, Glycine max
  Clone ID: ASG3244V4L-01-Q1-E1-A2
ggaacaagggcgcataatttattaaagccacgaaagagaaaacaacatagtgaagtctcttacatgacttgttgacacacagctgaaacaacataaagtgaagctagtgcccctatttgaacgcatcttattacatatagatagataggagcaagctagattgttgagaggtgaaggaactactgaatgtagtacaggggattaggaagcttaaaggtcctgctttcgcctctgtggcctccgaggagatcgctccattggtctccaatgatcccaacaatgttgtatccctgccttatcagtttctctctcgctgctgttttgtatgaaactgca

SEQ ID NO: 1031 - DNA, 351 bp, Glycine max
  Clone ID: ASG3244V4L-01-Q1-E1-A3
tgacaaggaaaatgaacatttattcacaaggtaagactgaagatgtcaacatgtcttgacaatttgttgaagcctttaatcagaaacatttactgatgaaagcaaacgcttctgctacacatgccatttgcaataaacctttttccatttcaaaacagcatcttgtaatcataatttaaagcatctcattcaaagtacactcactcatccactttcataagcatggcaacaccagaacatttgcatgagtcggatgttactggcatgttgaagcaagtacctctagcaaggaagcagcaaattgcatttgggtctcttcattgattgtagagaaaagtggcacgtgcaaaa

SEQ ID NO: 1032 - DNA, 411 bp, Glycine max
  Clone ID: ASG3244V4L-01-Q1-E1-A4
ttgggaggtaaagaactcaatttattcatatttttatttattcagttatagttcaggggagcatcccaagtgtaacaaaatttctgcttgtcaaaagcagcaaaaagaaaaaacattaataataacaaacagctcataaaacctaagtgtgtcctatgccggtcattttcctattcaattatgttagtttatggccaggatggattggaatgattcccattccaaaaaaaattgctcgcaatctccagaggttctgaataaaaactgctttgtcagcaaaaaaagtgtgcagaaaatcatgatgatgctgtgtactaatgatgtagaacaaactttacaacttcataaaatgaaatcacaattccaacggaggggcctgctccaacaactcgtgggacaacacccgtaaaa

SEQ ID NO: 1033 - DNA, 370 bp, Glycine max
  Clone ID: ASG3244V4L-01-Q1-E1-A5
gaacaaataaaacagtagtcttcaattacttcaaccaaaaggtctaacaaactacacgattataagcttaaggcaagtaataaccaactaaaattcaagtttgcaaaactatgatttcttattataaagcccctaccctacattcggggaaacttcaaaaccactatttttcatccaaattattcaatgcaaaggggaagcaacatcattgcctcagatagttgtcgtcgtcattatctgtatattaacctccaccaccagaaccgtatttctttccgaacaagacgagctgtagcttatcataaccagcgagcactccagcacctgcaacagcacgtaatatgtttgcaccggcacctttaaagagtga

SEQ ID NO: 1034 - DNA, 347 bp, Glycine max
  Clone ID: ASG3244V4L-01-Q1-E1-A6
gtagctaagacaaattcactaacaacttttcatacactgtcatagaatattattgacaagtaattcaaggcagaggagagagaggagaaaattatgaacaaaaagatttaaacaaaaaaatatcctacatctcaaaatgcagggttaatctttacccaaatcatccacatgactgtagcaaaataggaccaactgataaactaagcatgtcactgagagcaacctggacatcctttgacccatgttcacaacgtaccaagctagagatgagagggaagaaatgagacaagttcttctcaaaagaagtatctcccagactacagatagcctgcagagtagccacaatg

SEQ ID NO: 1035 - DNA, 374 bp, Glycine max
  Clone ID: ASG3244V4L-01-Q1-E1-A7
ggagcagcagctgaacgcaagcattttgacgaagcaccggtgatacaattccacaggtttgtctcactcgcaagtccaactatatacgaagaattacataaatacataagcaacgtgtacaatgctcttccgtgtaaaatggccataggtccaaagcattctccaacgattgtaatttgcaacacctttaaagttcctatgaccaccaatttggaatatttgctgtagcttcattcaccatttttacgagagtcaccacactttctggaacaccaggtggtggcaatgtcagattctttgggggagcaactttatcataagatcttttatcaaatctccattctccaatctttccataggtcagctcaaccttc

SEQ ID NO: 1036 - DNA, 282 bp, Glycine max
  Clone ID: ASG3244V4L-01-Q1-E1-A8
catcaaaatactagtgtacatgtacttgtcttcaactctatttacaactaactagttgaagttcctttggagggacgtgcttaatcgatttccgcatgcacgtaatccacgaattcaaaattcttttggagttggtttagggcaaaagctatggctgcgctgacaactgcgagtccagccaaaagtacacgcaactggaaatctgatgggatccctgatgttgcacaaaacacaactgttgccccaattaggactttctgccatgtttgggaacccccaaaa

SEQ ID NO: 1037 - DNA, 368 bp, Glycine max
  unsure (1)..(368): unsure at all n locations
  Clone ID: ASG3244V4L-01-Q1-E1-B1
cgaatcaaagggaacttaaatttttaatatctttcagctgagaagtaatgttcaagtcatcagcccagtcggacatgataactgtaagcatcatatacacgaggggttctataatcaataataatcagataaaatcaaactacataaacatgtatatacccttggaaaaactttttccatcaattagtatttgtgcctccaaaagctgcaccaacatactgaagtgaaaagctgcagaacatcaatgagattgactctccccgtttgatagatgataaattaccgaaagaaaatgtcaattctaagcaacagtgccaaaatattcttgcaagaactgataaagctcttttctgcacanagcaggatac

SEQ ID NO: 1038 - DNA, 380 bp, Glycine max
  Clone ID: ASG3244V4L-01-Q1-E1-B2
gaatcaaatcacatcataccttctttattattgatttttgttgtcattatacaacattacaaaatttattaccaatatgcattttttcaatattcattctcacattagagcatatttcgcaaccccaattgtggaactgcacgacataaagaagaaaatacatgatactttagagccacatgcactacaaggtcacgaactatattgaggacatgaatttgcaggcatttgtgtatgattatacacacacattgcatattttaatccggatgcacatcttggcccacatgaagccagaaatcacctttttgctgctctccgtcaatagaaacatgtttcagcaggtataccaaacaaaatttttccctgctttaccctcc

SEQ ID NO: 1039 - DNA, 318 bp, Glycine max
  Clone ID: ASG3244V4L-01-Q1-E1-B3
ggaacatgcaataacctttataccaggaaagttggctgacacatgcgtcataacaatccacaaagaccaaaataccatctcagttaatacaacaacttgacacatattgagaaggtgagtgacttgacaactgctgcaacatagaagacgacaagactgactgtcagacacccagactgagcaatgcttgatgacaactctggaccttctcaaccctcaaacatgtcctagtactcactgatcattttgatctgcagctgatgaaggagattcttcagactcagccggctttgtcagcacacaattctgtctgttgca

SEQ ID NO: 1040 - DNA, 213 bp, Glycine max
  Clone ID: ASG3244V4L-01-Q1-E1-B4
gtaaaaaaaaaaaaaaaaaaaaaaccaaggggttttattaaaaaagaaaaaaaaaagaaaaaaaaacaggataaaaaaaaaaaaaaaactaaaaaaataaaaattttttttttttttcagaaaaagaaaaaaaaaagaaaaggaagaggtcaacaaaaaaattctaaaacaaataccaggggtcctgcggaaaaaaagaaaacccaaccaaaa

SEQ ID NO: 1041 - DNA, 295 bp, Glycine max
  Clone ID: ASG3244V4L-01-Q1-E1-B5
ggactcaaattctttggattgattacacctgataaacaaaactgcaatacgaaaaaatactgagataattacaactaaatgcaataatgagcacacacaataacaattgtacataatgcacacgatggttccccaccactcaatgaaccccccaaaaagccgatgcctcaaatgcaagctactcgaggcatatagtgtaaatttcatgaacatctttccatttgaaaggtcatgttctcacatctttcagtgcaccccctttttcaagctcactgaccatatctttaagtgatgt

SEQ ID NO: 1042 - DNA, 363 bp, Glycine max
  Clone ID: ASG3244V4L-01-Q1-E1-B6
aaatcaaaatttgaaacaccaataatcatactgttttatgtaatctaattcttatcttatacttgtattaattttaattctaagcaaatcccatttgtacccccaacaaataggcattgcattattgcttcatgaggccggcccacacaaatgatacgctcctcatcttcaagtcaatcaatgtgtactatgcattagcattgccctattcacactttatatatggtcaaaatctgaggagtttaccagcagcagttcaagcaaatatcttgcaaagttgttcagttctctaccttgcatgagtgatcttactgaaccacagaaagtcttcgaaaccgcaccagttatacgttggaatcaatg

SEQ ID NO: 1043 - DNA, 377 bp, Glycine max
  Clone ID: ASG3244V4L-01-Q1-E1-B7
actaacaaaaaagttttttcacatccactcatttatagaacagaaggaacatatccacaaagtacttcacgaatagttcttcatttttagatagttacatggactatgttataacttaaacatcgatttgcaaagtctattgaaccaaagcacttgtgttgtagacaagaagtgcaccaccagctaaaagaccaagtagagtcacagcccagatagccaagccagtcgtaccgccagcgtagacatcaccggttggagaccagtccttggtgtcgtagataggactgtaaccatcgacattagcaccgtatttgtctacaaactggtaaaacacctttccctttctttcctgcagatgcatcagtttcaccctcaaa

SEQ ID NO: 1044 - DNA, 348 bp, Glycine max
  Clone ID: ASG3244V4L-01-Q1-E1-B8
tttaacaaaattacgatccaaccttaaaattagacaaatggtttggcaacccctacaaatcaccactccatcacaaaattactcaaaattccaacaatgttatatcatttaccaaccagcactcttaagtcttaactaccatactatttctatgactcaatttcctttatccttgtaaaaaaaaaaaccaaaattgccgaaaacaaaaacaacataatcgaaacaaataaaaaaaaacactgaaatttcactaacgtcaatgaagaggaacctcaacatctccatcagaaatttcctgctgcagatccttggggtccttcccatccacggttgcaccaaccgaaacac

SEQ ID NO: 1045 - DNA, 400 bp, Glycine max
  Clone ID: ASG3244V4L-01-Q1-E1-C1
ggaaaagcaataaatcaaagatttacctaattatgttgacactaataacatgattacagaaagaagtgtccagttgcaaaatctttcaaatcattggatcacactactctaatttaaccaaaaacatacaaacacttagaattcttttatttcataagtagtacaattactaggtaacaatactattatatttcacactatttttgaatgaggcatgtcacttatttagaatcacagtgctatgtcctgaattgattgcaattatccccaagagttggcctaacttttgtggttggccttctgcagtttgagtgacttcaactcctggatcagttccttcaaattgttgtgagaagacctccaaacctaatagctttcttagcagcatcactaagtgctt

SEQ ID NO: 1046 - DNA, 293 bp, Glycine max
  Clone ID: ASG3244V4L-01-Q1-E1-C2
tagacacatagcacaaccattttgctctcataaactcttcactacacgtgatcctatcatatctcaacatcgcacgataacaattgacaaagaaatcaagtaataaaacgacatggtattggcaagaaaacgcgaaaaccacgaccacaggatactaacgcacatgtacgtaacacttaaaaatacatacacaaattaacatgggcatgtctgttgagatggacgtcaccacaaatatagtaaacataaattaaataaacatagtgacgaggatatacagattattccaatcc

SEQ ID NO: 1047 - DNA, 342 bp, Glycine max
  unsure (1)..(342): unsure at all n locations
  Clone ID: ASG3244V4L-01-Q1-E1-C3
ctataatttgaaacaccattcatttcttaacttgagaaatgtttttttgataatctgagaaggactattcctaaaacaataacttacataaactactacacttcaacatatgtcatggtggtagtacatttcttaagctccactatgtcaataggtagattatctgctgggaaatcacatgctgtgatcttctccggcccttgatcaggtaacagaccacaaggtggaggggtcaccccactcgtcatcccttcaatatcagtgcaggtccaaggctgcttcttggccttggctgccatccttagtgtcacatttgcaatgcanattcctgtaaaagggtca

SEQ ID NO: 1048 - DNA, 388 bp, Glycine max
  Clone ID: ASG3244V4L-01-Q1-E1-C4
ttttctcagggggaaaaactgattttattggacaaaacatgcttacaaaaatatgatcaataaaggtcgctggatcttgaaattaccaagcatcagccatcaaccagaaatcctctcctgactgtaaaatacaagtatttacaacctaataacaaaaggatagggaaattctatgacatctagccagctataagaacaaatgcatagatgtatttacaactaagagaaatcataacttttctctatgagggggacaaaatatttttttttgctgcattcatgagcacaatgtacaatagtaactgaaccttcatgttcttcacaaccttacctgtatttggtttcctcgtttcctaaccatgaaccattttaggacattgcatacctt

SEQ ID NO: 1049 - DNA, 365 bp, Glycine max
  Clone ID: ASG3244V4L-01-Q1-E1-C5
tttaattagtaaatatggaacaagggcagaagatttattaaagccgcgtaagagacaacaagtaggtacgtggagtgtcttaggtgacttacccacataacataaagtgacattaacaaacatagctaatgctcctatttgaatagtgcatatcagcataccttattacatatagataggagcaaactctagctagattgttgagagaggtgaaggtactactcaatgtagtacatgggattaggaagcttaaaggtcctgctttcgcctctgtggtctccaagcagatcgctccattggtctccaatgattccaacaattctgtatccctgcctcaacagattctctctcattgctgatttgta

SEQ ID NO: 1050 - DNA, 369 bp, Glycine max
  Clone ID: ASG3244V4L-01-Q1-E1-C6
gaaaggtcaagtagtaaacgtaatacatttttatgaaaaatcgtgtaataaatttcattggacaataattgtatgcacactcttacgacttgaacacactagcacaagatcaaatcagctgggagtaatcttctcttctaaattttgcacacctcctaagattaacaatgaaaacctcaagtaaattaatttcctcctcccaaaaaaatgcaagaggttgtttaacttaggaactaatggttgccactttaggcacatgaacaggaaactcgtgaatctcatccatccaaggatttttctcctttgctggattaatggtcctcaatgcacgccacacagcactgttgcacttgaacccctgaacaaatg

SEQ ID NO: 1051 - DNA, 379 bp, Glycine max
  unsure (1)..(379): unsure at all n locations
  Clone ID: ASG3244V4L-01-Q1-E1-C7
gccacgcataataataccagtgttgttactgagacaaaattccagggtacaaagcgagcatcaattcgaacctatgaaatccgtgtctaatatttgaaggaaacacgcacccactctccattgacaaaaattattaagaatttggaacagaagaaaacatataatgggggaaaaaatactaacatatactctctattggtaataactagttgcctgctcatttagagtcagtgaaatctgcatcaatgacatcaccgtcgggtcncttgcctgaggattctgaggggccagagtcggcaccgggtggtggtgttggccctcctgcgcctgcagctcctggttggttgtaaagggactgaccaagctgcatgacttcctg

SEQ ID NO: 1052 - DNA, 283 bp, Glycine max
  Clone ID: ASG3244V4L-01-Q1-E1-C8
gatataaggaatgttaaatacttcattctgaagtgaacggaggagacaaacattaaatcctataaaactgagtaactgacactgaatttgttttcctaacagaagtttacatgttctttctatggatggttccagttcatcttgtaacagataaatcaaaatataaaagaacttgtattgtatgtgacatcagtctattagctgcacagctgcaatagcaggtatcttatctctcagcttctgtgttaaggcaacacgaactgttgtaaccccagctgcaagt

SEQ ID NO: 1053 - DNA, 384 bp, Glycine max
  Clone ID: ASG3244V4L-01-Q1-E1-D1
tttttttttttttttttttttttttttttttttttttttttttttttttttttttttttttttttttttttttttttttttttttttttttttttttttttttttttttttttttttttttaaaaaaaaaaaaaatttttttctccccccaaaaaagaaaattttttaaaacccaaaaaaagggaaaaaaaaaaagggaaaaaaaaccaaaaaaaaaaaccaaaaaaaaaaccaaaccccaaagaaccccaattttcgcaaaaatttaagaaaaaaaaaaaaggttaaataagtaacaaaaacccgggtattttattaccaaaaaacaaagggagaaaaaaaaaggtcggtataaacgcgaaaaataacgaaaaattattaccc

SEQ ID NO: 1054 - DNA, 340 bp, Glycine max
  Clone ID: ASG3244V4L-01-Q1-E1-D2
caagaaagctataattttatttgttgaccatcattaaaagaaaagaaaaattaaggcatactaaatttacaatttaattaaggaaaaactcaagaatgcccttccaatgaaataaagcacttggatgcctgcagggtcaattagttgttgaaatcagaagaacattctgaaagcatcaacaactttctcaggccagtcctcttgtggcatatgaccagctccttctatcaatttaagctggatttgtgctggatttcctttctgaaactgctctgccacagactggggcaagtacttgtctgataatccccaagcaagtagtattggtttatcccatctc

SEQ ID NO: 1055 - DNA, 356 bp, Glycine max
  unsure (1)..(356): unsure at all n locations
  Clone ID: ASG3244V4L-01-Q1-E1-D3
ttcgcaatggataaaagcaccaaaatgcaattatagaagcacaaattttttagggtaatgaattacagaaaatgtcatgctgtgtattttgaccaaaaattgtgcgtgctcctacaaatcattttactagttagtcatataagggagaaagggaaacagtatgtggtggataatatcagggccatcataacctacacaactctgaacaactcttcataaatatcactgacttaaaatgcaattaggccttcgatttcttccctttggcttcattagatggttggctcttgaaaggcangaaagtctttccacccatgaatggtctgaggacttctggtatctctaccccatcttcc

SEQ ID NO: 1056 - DNA, 352 bp, Glycine max
  Clone ID: ASG3244V4L-01-Q1-E1-D4
ccatcaattatttcaactataccatgcagttttaaatcaaccatttacatgagaagtaacgagtcaataattaatgaaaccagtaattcaaaacttaataaaacttgtaattcaaaaatgcatccactaatatttttcagcatacaaactgtagagaattaacacaaaatttagtcctcgtgtatcctcaatgtagatacagattaggaagaagtgtccctgccgattgcacaattggttatgaaaattcaattgctgtttccaacattagtctcttgcatatatgcttttggaacatgcatatgaattccccagttaccattcatgcttgatggtacttatcctaaagtta

SEQ ID NO: 1057 - DNA, 391 bp, Glycine max
  Clone ID: ASG3244V4L-01-Q1-E1-D5
tctattttcattcgaattcattttatttatatattaatattatattcaaatgaaataaaaagatattaaaagatactaattataagaatttgaaagtgaaattataaagttattaaatgattaatcaatttttttctacctgttcctgtagtaaaaagagttccatctgttcttgaatagcttccttcaaaaggacttctgcttccccagtgaatgtcttggtagaagatatgatttctttgaattgaggtttattcgtgtttaagtaagcacgtaactcaacaagaaatttccttacctgtccaatttctaatgaatcaagataaccattcgttccagtataaatagttattatctgttcttccacggtaagaggagctgattgggattg

SEQ ID NO: 1058 - DNA, 321 bp, Glycine max
  Clone ID: ASG3244V4L-01-Q1-E1-D6
tttctcaaattagtaatgtcattgtaatatctagaattcactatagggttgttctcatcaatgatgggcagccatcagtgatcagacatgtggcttattttcttgttgtgctaggtacaaatttgatacatgtcttatcatgaaaccatgcttattatttatcctcttcaagtacacaacagtctttggatcagaatggtgccacttcacttcgagaaaagaatagactagaaggacctccattaggtagcagagccaagcttacaacactttcagcaccttcagcaacactaagatagccagtattgtagttgagatctg

SEQ ID NO: 1059 - DNA, 329 bp, Glycine max
  Clone ID: ASG3244V4L-01-Q1-E1-D7
gcacattaacttgataccattaagtatatcatataatatgtgctacaagttgatcatgttggtcccggttcaaatagaaaccgaagagatgaaacaccgcacattactgcagtgataaggccatcaggtttcagacggacaacacgtacacagaagattagttgtagcaaactcagacacagaacagaaatacggccgtacctgatgcatgagacatctaatggctacagcagcggcctcactaacacggattgtcgcagatgccatcagagcagcgaactcggtgagaatctcatcgtcaaccctgtagcctacatccccactaaggt

SEQ ID NO: 1060 - DNA, 241 bp, Glycine max
  Clone ID: ASG3244V4L-01-Q1-E1-D8
aaatatggaacaagggcagaagatttattaaagccgcgtaagagacaacaagtaggtacgtggagtgtcttaggtgacttacccacataacataaagtgacattaacaaacatagctaatgctcctatttgaatagtgcatatcagcataccttattacatatagataggagcaaactctagctagattgttgagagaggtgaaggtactactcaatgtagtacatgggattaggaagctt

SEQ ID NO: 1061 - DNA, 362 bp, Glycine max
  Clone ID: ASG3244V4L-01-Q1-E1-E1
ttgtttttttttttttttttttttaacaacaacaataatagaattccgatatagcatctcaaaagttaatagataacagaattatttattgtaagtatatcaatacaatctcaaatgagaaagagagaggttatatacgtaattaacaaacataatgaacataatgagcaagaggtcggactcggagctaaacaaatcgacaaaacttaaattcctaatatagttcttatctgattaggtggatgccttgccaacgacctggggtccggataaccattcttgggatccataatagccttataaataaggtcataagcttcggccagtgacctggccacgccaatagtaacctcaaaacgcaa

SEQ ID NO: 1062 - DNA, 276 bp, Glycine max
  Clone ID: ASG3244V4L-01-Q1-E1-E2
aaccactccaaacgggcccttaaattttcaacttctgaagccatagggagtggcaattccaaacgactctgtcagactcatacaaaacaaacatattgtttaagaatatgcaccttgaaatacagaccaagaaattaacactttgcaataggcttattgattgtattacaacgagtagcaccatcatgcaccaagaacaatgatgggtacttctttcagtttctaagacaactattgttgattgtgtctcaaagcatcttcaagcttggcattttt

SEQ ID NO: 1063 - DNA, 349 bp, Glycine max
  Clone ID: ASG3244V4L-01-Q1-E1-E3
gaacaaataaaacagtagtcttcaattacttcaaccaaaaggtctaacaaactacacgattataagcttaaggcaagtaataaccaactaaaattcaagtttgcaaaactatgatttcttattataaagcccctaccctacattcggggaaacttcaaaaccactatttttcatccaaattattcaatgcaaaggggaagcaacatcattgcctcagatagttgtcgtcgtcattatctgtatattaacctccaccaccagaaccgtatttctttccgaacaagacgagctgtagcttatcataaccagcgagcactccagcacctgcaacagcacgtaatatgtttgc

SEQ ID NO: 1064 - DNA, 346 bp, Glycine max
  unsure (1)..(346): unsure at all n locations
  Clone ID: ASG3244V4L-01-Q1-E1-E4
atatggaagggaaaaaatcatttactaaagagccaagttaaaatttaattccctatgttaaaaaattacaaactcgagagtaaattgtcccacgagacccgcaaactagcaggcaaagaagcagaaatactttgttatagaacagctctcaaaaacaacatgtgagtaaagagtgccgaattgaatgcaacgtattccgtatcacaaaaacgtgtagagcctgagcctcctcctgtctgtctacgaacccagttagacaggcaatttatgatcaacgtaattatttgcgacgtctgttggttactaaatctggtttgcctttcctcatcatggctacanactcatc

SEQ ID NO: 1065 - DNA, 396 bp, Glycine max
  Clone ID: ASG3244V4L-01-Q1-E1-E5
ttgcgtgcagaaacactcctcaattaagtagaaaactcatatagtagttattttacactaggaaggaaaacgtaaggtttgctcatcaagtgatgagcagctttgtgtagtttcatactcatacccaaactgatgtaatagtcaattgactgaattcacgtccgcgaaaggagttctatttggagatgcagccagacgtgggattttgctttctgtttggatcaatttcaatgggttttctgtggacttattattttctgtgatcagtgtcctcatatcctcaatggatgctgggctgggaactggtataattcttttctgagatcttgcattctggtcaaacaagtaatctttaaccaggcttttttctgcttgaatattgatatttgatacatc

SEQ ID NO: 1066 - DNA, 369 bp, Glycine max
  Clone ID: ASG3244V4L-01-Q1-E1-E6
ttagaaaattaagtaacatttttttaatattgagactcaggaatcacttagtacttcccaccatttatatatatatatatattcttcgttgtaattttatgcaaaaagggaagtttcttcctccctttaactttctaattccccaattagatattgaggaatacgaaattaaatcacaattacaataataaaaaagggacataatgaaactagcatgcgaggtgcatagacttattggtgtcttcatgtggtaatagcatccaaagccaggatggtgctgaggttcattgggttcatgtagattttagaacctgacataatttcttccacaataagcctaatgggcttttcagatggatggaatgcatc

SEQ ID NO: 1067 - DNA, 390 bp, Glycine max
  Clone ID: ASG3244V4L-01-Q1-E1-E7
ttcaaggtaagaattttattgcacaatgagaaggcagagaaaattgatggttctgtttctcagtacaagttttagaatgaaaaatgaagcaacaagtgtttgtagtggtagtagtagtagtagtaagcatacaaaactacaatggcatggtacatacatataataattgaattaccaattcagaatttgatggctctcacttccacttgttggcaacaatgtcagccaaatccacaaccctttgggaatagccccactcattgtcataccaagcaatcaccttaaccatgtcatctcccatgaccatggtcaacgatgagtcaacggttgaggacacatcagtgcacctgaagtcaacagacacaagtggctcatcacacacagagagga

SEQ ID NO: 1068 - DNA, 344 bp, Glycine max
  Clone ID: ASG3244V4L-01-Q1-E1-E8
taagagtaaaccattataccatatatattaaagaccataattaacatcaaaatacctcatccaaatattcagattattctgcacaactcacaaaacatactaggaagggcgttcacaatacctcatccaaatattcagattattctgcacaactcataaaacatactaggaagggcgttcacaatacttcatccaaatattcagattattcatcaccaaaacccttgacaagcagcttttaggcttttttgcagacttctccatcacaaacccattcatctttggacttttcttccttggcatcatctttgcttccttctttgtcctccttttccaatgcacat

SEQ ID NO: 1069 - DNA, 276 bp, Glycine max
  Clone ID: ASG3244V4L-01-Q1-E1-F1
acaagataaataaaaaaaataaaattatgaaacaagcaacatacattgggaaggcagtgtccacaaattcaaacagcagggaatatgaacatcccacaatgcaatcgacgccatcccaaactaacacaactcattttcccccaccaaaagaaaaaatggctcaggaatcatatagcatctatggggtctactttccgactaccgaccgactcaaaatatgaggccctcaaacagactcaatccttttattatatttatgctgcatagaagaaatgt

SEQ ID NO: 1070 - DNA, 381 bp, Glycine max
  Clone ID: ASG3244V4L-01-Q1-E1-F2
ttttctccttgaatttgataaaataattattgattcttacagtgtacaagtcagagcgtattttatagtacaaacataattctgtgacttgcgtgtatgattatgcaacatataattcggcttttccatcaatgaatagactcatgaactcttcaccatccacagtttctttttctatgagaagttgagcaagcttgtgaaggatatcaatgtgagttgagataatatgtgttgccctagaatatgctctctctaccagttccctcacttccacatccactacatccgcagttgccatggagtaatccttttgcgatgacatctgttgacccaagaatggatttccaccaggtccaccaatgggaacttgtccaatttttt

SEQ ID NO: 1071 - DNA, 194 bp, Glycine max
  Clone ID: ASG3244V4L-01-Q1-E1-F3
aaaaaaaaaaatattaaaaaaatcccaaaagggcccttgaaaaaaaaaggaaacaaaaaaaccagtacccccaaaaaacaaaaaaacaatttaggggaaacacaacaaggggacaaaccaaacagggaaacccaaatttcgggaaaaaaaacacccaaaaattttccaaattccatcccaggtccccgggaaaa

SEQ ID NO: 1072 - DNA, 104 bp, Glycine max
  Clone ID: ASG3244V4L-01-Q1-E1-F4
tttttttttttttttttttttttttttttttttttttttttttttttatttttttttttatatatttattttttttttttatttatttatatatttataatatt

SEQ ID NO: 1073 - DNA, 382 bp, Glycine max
  Clone ID: ASG3244V4L-01-Q1-E1-F5
tgatgacgcaaaacaactatatacgaaatacaattatgctctgcaatttcgtgtttctatcatggcaaaagcagaatataattacaaaattacaaacatacaggagagcaacatattctgtaatcacagacaaccatcacaatcgcaatcaaaactcaagcagtatgtgataaaccctataatctctctagaagtggtgcaatatttgttaccctataatcccttcattctcttgtatactttctctacaaagttgtctccctttacaacattagagtagcaaaggttatataaagcgcaaggattaaagaccaatctttagactcaaccgaacggagaaggaactggtcctgctcctgcaagagcatctgatctcttgatg

SEQ ID NO: 1074 - DNA, 305 bp, Glycine max
  Clone ID: ASG3244V4L-01-Q1-E1-F6
cagagataatcacccagctactttcaaccttgttggaccactctaaattagtttaataatacaacactttgtacagaataatactattaggaagggggatatgcttgagctggttgtaaaaaaattttgacagtaaatcttagataacagttcaaaaagttacaagtaaacaaaagtgccatactttcaaccgcattagacatgacctgaaggaggtataccttctgaaagagtgatgaatcattcatttgggaaagtgaaattagtgatacccagcaagagtttgtttgaactccaaataatga

SEQ ID NO: 1075 - DNA, 299 bp, Glycine max
  Clone ID: ASG3244V4L-01-Q1-E1-F7
ttaaataacactgtaatgaaccaccatggtttcacacttttccactatatattcagttccttctgaacacaacacaagctacaacatataggattccatttgaacccaatctgtagtttttgtacaagaacccatatgcaaaaatagttcattcttattctattctcttagtatatatgtgtataatacttataatggaccatcctctatacaaaagtaccagtaatacattatatataggttgttgaatatccaagcgccctccgctatatattcattttgttttgtctttcggactc

SEQ ID NO: 1076 - DNA, 348 bp, Glycine max
  Clone ID: ASG3244V4L-01-Q1-E1-F8
ttattaaatgatataaccaattaattttctgttttgaaataataacccgcgtaccactagtgtacactatgtactccccctttatcacactcacaaaattaaatatacgcattcatgcaatattccgttaccacaagtcacaactatcttacagaaagtaatctttcactatggttactataagataatcacgtacatgccttgctccaatgcaaagaaaaacgttatcttagcaaagggcaaaatgatacttcacactacacttaaaagaccatatcatttgtgaattcttcaaccaaatcatcagtgattagacatgccatctccctttccaatgtatcaatatga

SEQ ID NO: 1077 - DNA, 391 bp, Glycine max
  unsure (1)..(391): unsure at all n locations
  Clone ID: ASG3244V4L-01-Q1-E1-G1
atcacctttaatctacttggacatatcacatatataaacccaagtacgaacacaagcacaaatgaacatagtagatctagcaccaagtgaaaaagggaacagaggaataaaggtacaaattatcaacattgttatttagccatcattttttttttaacttcattcataatataagtacattgcataatttttttaccgatgttgggtacttaagtagtcacgtccaaacagcagactcaattttattaagaataagaattggctggcgcaaatttcagcgaaatgctattgacacaatggcgttcgttagtgggtgttggaaatccttctcctttaaagacgtgacctagatgtccccacangcagcacacgttatttctgtcctcatccc

SEQ ID NO: 1078 - DNA, 397 bp, Glycine max
  Clone ID: ASG3244V4L-01-Q1-E1-G2
tgacacattaaaggtgaaattattactatccaaataatccgatgacaacacaaagatatatagaaacaaataatataagcgggtttctaaagacaaaaattctcaattcagggtagttccccctagaacatagtttctaaaacttgcaattctcccagttgccatgatctccaaatcccaccgattgtagtttatattttattgaaggccacaatgtcacaactctggacatattcattgatgggctcaactgtgagatgttcctcaataagagtatcaacagaaactaggtcatccacaatagtaagcataatttgcagtttcttaataccgtatccaacaggaacaagtttggatgcaccccaaagcaaccctccatctgaacagatctcactga

SEQ ID NO: 1079 - DNA, 322 bp, Glycine max
  Clone ID: ASG3244V4L-01-Q1-E1-G3
tttgatgctaactagctaagcaatataagattaagattagtccataaaaaaggagaacaataatcaaggacaatcctgtttagcacaagcactcaataaaatctaaaacaatactaatctagagaatttcaacgaaggtttatctaacagtcacctgggtggctctgttcctaatttctaagaccttcttgtgagagtttgagtgcagtgatgctacaaaagtggggctagatgcaggccggtattcagcaaagagccggccagaccggtatcgaaccccacaggcattgcatagggtcttaggacccattggtccttctct

SEQ ID NO: 1080 - DNA, 362 bp, Glycine max
  Clone ID: ASG3244V4L-01-Q1-E1-G4
ttagaaaaaaaggaacaaaacgatttttatttaagagtgatggagttcattccacacatacatatggctcctcgttttaaagcttaaatgaaatacattaatttctcaaatttaggtaatgatgatatggcttctatggcactgcctagtggccatgctgcttccacgagagaatcttgatactcaacttgcctcaccaacgtaatctcttgctgcggatctatgccaaatccatcaacgagcaatgtatattcgtatacaagatctaagcatatataaggaacgtctccatccttaacacgagggaaaatggatttgagatcctttaattctgtgttacaggcaacctttgctgcattctc

SEQ ID NO: 1081 - DNA, 289 bp, Glycine max
  Clone ID: ASG3244V4L-01-Q1-E1-G5
tttttaagctaagtaatattgaccagaaatgtataccacatgagcacaaatgacaaaaaggcaatctgccacccacctggctacattataaggaataactataaggtctctgcttagaataaacaaggaaaagggatcctcatattatgcttacaaaataacctgtcctcaatctcatcccatgcaatgatgcaagggtagtataataataactaattgttatatacatgattatcatagattacaaatttacaaccattaggctgcttgcatgctcacagttgaatca

SEQ ID NO: 1082 - DNA, 342 bp, Glycine max
  Clone ID: ASG3244V4L-01-Q1-E1-G6
ttttgcacaaaactggtaaaattccagatcaataaggattgcggcgaagccgcaaagatacaacattcattagggaaaacaggagtggggaaaaataaggggggaggggttgaggaagaatcaattgctcacagagcatgctaagacacctaaatattccacacacagttattgaaacaacccaatatagagaaaatttttctttggtgtattataatataaagcagaaccaaatgacttggaagattctactttcttataccattcacttggcaagttcgttgcggatgagttttgctgcggcaaccatgtttgtgagggctggcttcacctcagtgtact

SEQ ID NO: 1083 - DNA, 293 bp, Glycine max
  Clone ID: ASG3244V4L-01-Q1-E1-G7
ttttaatgacgaaaatataccctattaaattatgaattttgttaaataaccgtgcgcgaaaggatgctgacactacgccacggctgtttcttgaactgttactgggactatgcctacgtgaatcatcctacgaagcacaaaaaattgaacaagttatgtctttacatgaaaaattatttaatggttccaggaccatggtgtttctggtcaatcttcacatgacatataatcaacttttattaacttttttctggtaaattaaaaaaactcagctacatgaacttactcctggt

SEQ ID NO: 1084 - DNA, 367 bp, Glycine max
  Clone ID: ASG3244V4L-01-Q1-E1-G8
atgacaccaacccatctatcccattttcaaaaattacaaaaataatatacaacctcaaataaccatagactttcaaatctctaagctatctaagaaactaaaatggttctatgcaaggtataaacctatactagagtaaaattccttctttctttacactaagattttatcactactcccaagaaacaagcacatggattagaagaaaatatgagagacccatataaccaatgtcaccaactatgatctatcccctcttcaatgtcttatttaggccacaaagtctggtagcaattgtgcagcaaacctcttcgggttctgcatgttgatactctcaaatgctgctgaattgtgagaattgggattg

SEQ ID NO: 1085 - DNA, 303 bp, Glycine max
  Clone ID: ASG3244V4L-01-Q1-E1-H1
cgtccaaaattcactttggaaatagcattaagtccaaatgttaatttgcacagcctatttatgtggtttttcacatgcacacatatacatattcacaatcaaatacaaaaagagcaggggccagaaaactacaatacaaacaactattgttggcccttgtataacaataatatatatcttttttggagcataattgaatgaaccgtgtgtggcaatcagatcaaatccgctggttttcatttagatgccttgtggccctgtcctttgatctgactagcggctgcaaacatcaacacgcaagcg

SEQ ID NO: 1086 - DNA, 338 bp, Glycine max
  Clone ID: ASG3244V4L-01-Q1-E1-H2
gacaaacagaaacttgaatatcgatcaaattatcaatggagttatggacaacattctatgtgagcgtaactcgtaggacagtattgagtcactgacgtgttattctgtttattaacaatagaataacaatactcctaattttctctgtgtcatagagaatcaagtttcaaggctttcatccaaaccttatcagaagaaaaagtgctttaaagaattatgtacgctgggaatttgtgtgtgcaatgcaactgataccagccatcatcaaggagttctccactgaagctcaatttgaattcgtccatttcttgagtcaatgagatgatatttctcgttga

SEQ ID NO: 1087 - DNA, 323 bp, Glycine max
  Clone ID: ASG3244V4L-01-Q1-E1-H3
gacaaaaattcaaagtcatgaatttttttattatttcatacctaaaaatagtaaaataatttatgacttacctcatttgaaaattaattaaaaaatatccccatttaataaaattccaaatgaaattaccccttttgttggaaacctccattaatagcctttaaaccaccatacatatagcaagcaactatgaattaaaatttaatgagttaacttccccgacttgcaaatcacacataattggaatatctaataagttgatcggttgaagcctaatcaattctacttggaagtgatatggaggagtcaagccatggtccccc

SEQ ID NO: 1088 - DNA, 276 bp, Glycine max
  Clone ID: ASG3244V4L-01-Q1-E1-H4
aacctaaaaaacaacaatcaaatacaccttgcagcatctgagcaggcctttaccaaccaaaattgtttttcagataaattcctccctttactcgtttcaagttgccacaaaactccacacatcaaaaaatttaatatcatttcctaaaaaatccctagtgaaatgaactacatactcagcaccaacaaatgtgtggagagcagtgatggtctgagtcattggcaagaggttcaagagtaaaccttatgcagtccaatgttgagatcagatgatatg

SEQ ID NO: 1089 - DNA, 281 bp, Glycine max
  Clone ID: ASG3244V4L-01-Q1-E1-H5
atcgaagccaggtgcaaccccatcttcatgaaaaaatagcataaacaaataaacataatacaaattgcagatatacaacttaaattttgaataaaactaacacggtctaagaaaaacagacaatctgtcaaaaaaaacactagccatgtaactcaggatgccagccaaatagaagattcaatgcccttccttccaatctcccaaaatgtcacttctttgatttctttgatgcttgggctggcagggatgctattgcagatggagcacttggggctgctgat

SEQ ID NO: 1090 - DNA, 281 bp, Glycine max
  Clone ID: ASG3244V4L-01-Q1-E1-H6
actgattagcaaaattcaattgatctctcactttatgcagacttcattctcaattgatccaacttttccatacacgaataatgccatccaactagagggacagtaatcaaattcaatcactggagcctgtcgaaagtagtttaaccttaacagttctttcaacatcgtgatcctttagcatacgtatgttgtgagtggtagagaagactccgctaccgcgagcagcctaaacagatctaccagaattacacgtgaactgctcacgcttcgatgaaacatct

SEQ ID NO: 1091 - DNA, 246 bp, Glycine max
  Clone ID: ASG3244V4L-01-Q1-E1-H7
gctcttaagttcatgaaggaagataattctgacaacagaaatagtcttaaatataaaacaagcaagtatatagcataggcaaatctacaaggaagatctttgataaacaaacaagcatagcataaatccacatggcagatctttgattcatattttatgagctcaacaaaatcattcaaatgcccattgattttcccgacgaacttcctcttcttcctcaggggtgaagtcattcttaatgttaaa

SEQ ID NO: 1092 - DNA, 341 bp, Glycine max
  Clone ID: ASG3244V4L-01-Q1-E1-H8
atgtaaatgctgataatcacattgcatacaaaacaattacatttgtaaagaaaaagaatgttgggaagacacaaaatcatctcacccaacaatgcccccacatacccagtaagggaataaaataggacgcagactgcgtatgaccttaagatgaatgcgatagcaatactttcgttatctacaaaactataacattccgactaaagtctaaaaggaggagggacagtctcgatataagtagaaaaaactgaaagcgtccatccgatgagtgcataattttgattaaaaccatatgttgcctcatccaatatcttgaaccagattgtgggggaacccggggc

SEQ ID NO: 1093 - DNA, 203 bp, Glycine max
  Clone ID: V4L-01-Q1-B1-A1
atccatttaaacgtcaatccatgcttttggttcagtcacgttgaggtgcataagaaagcgtgacaagggagaaacaaacatactctaaatggacttggggactgatttgggctaagtgcattgtggcagatgtatgatacagcctaaggatttgcttctgattaacatgcttatttttgggttacatattttttacaaacatc

SEQ ID NO: 1094 - DNA, 373 bp, Glycine max
  Clone ID: V4L-01-Q1-B1-A2
gaaacagtgtgatgaaaatgaaggtccttgttttcttcgttgctacaattttggtagcatggcaatgccatgcgtacgatatgttccctctccgaatgaacactggctatggtgcccgtactccggaggtgaaatgcgcaagttggaggcttgctgtggaagcacacaacatctttggctttgagaccattcctgaagagtgcgttgaagcaacaaaggaatacatccatggcgaacaatatagatcagactccaaaacagttaaccaacaagcttacttttatgccagagacctcgaagtcaatcgcaaggacacatttgtgttcagtatagatggcaccgtactctctaatattccatactacaaaaaaca

SEQ ID NO: 1095 - DNA, 359 bp, Glycine max
  Clone ID: V4L-01-Q1-B1-A3
atttaatcagagctttgagtagataagactcgtggatgtgtcatctcctttattcaacgttgaatattgttattattccttcctggtattaaggaaatactctttcgttgaagctctgaatattaacagagcatcatcggcagatggggtctgaaggtcctccagcagctgtgacagttcatgtaacaggtttcaagaaattccatggagtttctgagaatccaacggagacaattgtcaataatttgacggaatatttgaagaagaaaggtttgtcaaaaggtttagttattgcgagctgcagcattcttgagactgctggtcaaggagcactcattcccctctacaagacattgcag

SEQ ID NO: 1096 - DNA, 410 bp, Glycine max
  unsure (1)..(410): unsure at all n locations
  Clone ID: V4L-01-Q1-B1-A4
gaactcgtatgcaggcatttaaagagactcaaattggtaaaaagcctcctggagtgatccagactctgctaggtgttgtctcaaatgtcaagagcacaaacacgccacagaacagcttgcaaggttatcgtgttttgtggactggcatgggggctcaacttgcccgtgatgtacccttctctgccatatgttggtcaacacttgaaccaactagaagaaaacttcttggtttgattggaggtgatgatgccaatgcattgagtgttcttggggcaaattttggagctgggtttgttgcangaactttagcagctggagccacatgtccactagatgttgcanaaactcgnaagcagatagagaaggattcctgtanggcattgaaaatgactacaagacagacactgatg

SEQ ID NO: 1097 - DNA, 348 bp, Glycine max
  Clone ID: V4L-01-Q1-B1-A5
caatcttctctccacgcccttcttgggtaaccgtctgaagtgcagcaatggcagatggattgcattcgcagcatccatcggtagttcagaagttatctggacagtcttatcttgtgtccaggcttgctcctaatcactccagaaactgttctaccactggtagttacttcaatggaggtttgcagtcttcaggtttggttccagtcacggcacacgcgccggctgagaaaggggtgtctggatttttgttggatttcctgatgggcggagtgtccgcggctgtgtccaagaaaactgcggctccaatccaacgagttaagttgctcaaccaaaaccaggattaaatga

SEQ ID NO: 1098 - DNA, 301 bp, Glycine max
  Clone ID: V4L-01-Q1-B1-A6
ccctcattcagccaagaaagttgaagcaacagataatagccctgaaagtggaggttttaccatggtaaatgggaatggagaagaccctgttgatggttctgactcccaatcggaagtctccaatgatgtatctgatgtttcaactattgagcaacgacgggcttataaactggaactccaggaaggtatatcactttttaataggaagcctaagaaaggaattgagtttctgatcaatgccaacaaagtgggtgattcgccagaggaaatagctgcttttcttaaagatgcatctgggttg

SEQ ID NO: 1099 - DNA, 406 bp, Glycine max
  Clone ID: V4L-01-Q1-B1-A8
aagaaacatttgaaacttgcacgactcaactacaatctctcttatgaacacatctcatttgaacctctataaacaaattttcaaaccttaacaccttacgaaaatcaactaaagaaaaccattgatggcgctccctcactccatctctgccttagccaccacactcacactctcctccccaataaccaaaccccataaagttaacccctttcccttttcctcgaaccgaaattcacaatttttaacgaaacaaacgcgacccagaagcagaagaaacctctccctaacccctgcacgcgttgcggcgccaccctcaacggttgaagccgatcgattatacccagaggccgaaaataacgaaactgaggaagagtttagcgacgagagctcttcctcgaaattcact

SEQ ID NO: 1100 - DNA, 348 bp, Glycine max
  Clone ID: V4L-01-Q1-B1-B1
gaatttttcattttcagctttcaccacaaccctttgaagctctgcatcctctaatggctctctccacaacatttatgcccccttcatccccaagattgaacctttactccaaaattcgaagacccttttaccctcactctgtcagattccttaaccccctaaagattcgggcttcaactactctggattattccaacgtctctacgaacgacaaatccccccctttgaagactagcaattggcaatggaaattcaaggacaaccttataaacatttattatgaggagcatgtaaaggagagtccggagccttcccaaaatatcttgatgatgccaaccatttctgatg

SEQ ID NO: 1101 - DNA, 392 bp, Glycine max
  Clone ID: V4L-01-Q1-B1-B2
cgtttctgcacgtaacagctcttgttcgctactccatttgccgcctctggaactccgaacgttgaacatggacgctgccaaagaagaatttctcagagactttggtgaacactacggctaccctaacggccccaagtccgttgatcaaattcgagctactgaattcaagagattacaattacaagatcttgtatacttggatcatgctggggcaactctatactctgacctgcaaatggaatctgttttcaatgatctcactactaacctatacgcatatcctcacagccaaagtgactccagttctgcaactcttgacattgtcaagaaagcccgccagcacgtccttgactactgcaatgcatctcccacagaatacaagtgtatattta

SEQ ID NO: 1102 - DNA, 376 bp, Glycine max
  Clone ID: V4L-01-Q1-B1-B3
tttttccacaaccttgaatgtttaccgccccgccggataaggagaaggagaaggaggatctgcgtcgcaggcactgttcatcgccatgtctcgggttgataacagaaattcctcagccaccaagcgtgctaggactgatggtagtcgtagggaagatgattggacatgccccagctgtggcaatgtcaatttctctttcaggacaacttgtaacatgcgtaattgcactcaaccaaggccggctgatcataattcggtatgatattatatgtaatgtcattttttttttaaaatgtgattttcatttcgttaatgatttatggttaacatttagttgaagaattcttttatcaatttctctctttttgcatgtgtt

SEQ ID NO: 1103 - DNA, 407 bp, Glycine max
  unsure (1)..(407): unsure at all n locations
  Clone ID: V4L-01-Q1-B1-B4
ctcgagccgttttttttttctttttcttttcatttgagagttttagtgagacaatgacgtcttcaatggtggaaggtggacgcgacgaggggaaacacgagccgtcggatttgatcacggaaaccatgaatctgacggctccaaacctttcacttcccagtgaaactgaaacattcttgagcgcagcaatttccctcaaggacaaggtggtggaggagacttggaaccggagagatcaagtggttgatccgacggtgtacacgggactgttgggcaccgcctttacttgcttgcggtcctaccaagttaccggttgccggaacgacttaatattatccagcganatcattgacacgtgtgtccacgctgcacgtgcctcnctcaggcacgtganctttntgtgtggt

SEQ ID NO: 1104 - DNA, 404 bp, Glycine max
  Clone ID: V4L-01-Q1-B1-B5
gctttcttgaaaaggccaacactggacccagtagaagttccagccgagcaagcagtcctggaagatcttccatgcaatatgttgatgagcagatccagggatttaaagtgaatctaaagccagaaaagacatccaaatttgcatctgttgtgttgaagatacgtggaattgatgaagaaacctggagacagcatgtaacagggggaaagcttagggacattagtgaggaagcataagattttgcaattggaaagaaggctcttgcggcactatttgtacatactccagcaggagagctgcagcgccaaattagattctggcttgcagagaagtttgattttctatctgttatgggaaatgatgcaccaggggggacaactggtcagttggaacttagttcaact

SEQ ID NO: 1105 - DNA, 406 bp, Glycine max
  Clone ID: V4L-01-Q1-B1-B6
cttaaacaccactcattcggttaaatagcagcgaacattgctcatgttatactaccaagtttctctgaatcatatgatcccattcatgcctcaaacacaagccatgatgcatgctaaatgccatgctcatggttcttgatctaggttggtgccatcacattattctataataccctcttacccttctcactcttttttgaagatttcattgattcccacgtataactggtgcggtttcgaagactttctgtggttcagtaagatcactcatgcaaggtagagaactgaacaactttgcaagatatttgcttgaactgctgctggtaaactcctcagattttgaccatatataaagtgtgaatagggcaatgctaatgcatagtacacattgattgacttgaagatg

SEQ ID NO: 1106 - DNA, 333 bp, Glycine max
  Clone ID: V4L-01-Q1-B1-B7
gctgaaatggcctcttcagtgatggcatctgtggccctcaaacctgcccctttcactgttgagaagtcctcagtgagaggccttccctctctctcaaggaactcttcttcattcagagttgtggccagtggcaagaagatcaagactgacaaaccttatggaattaatggtggcatggctttgagggatggaactgatgcatctggcaggaaaggaaagggaaagggtgtttaccagtttgtagacaaatacggtgctaatgtcgatggttacagtcctatctacgacaccaaggactggtctccaaccggtgatgtctacgctggcggtacg

SEQ ID NO: 1107 - DNA, 365 bp, Glycine max
  Clone ID: V4L-01-Q1-B1-B8
caaagagaaaagaaaaaaaaaacaacagtggtacgtgatgccaccgaagttcgatccctcgcaggtggtggacgtgttcgtccgagtcaccggcggcgaggtcggcgcggcgagttctctcgccccgaagatcggtcccttgggactctccccaaagaagatcggagaggatattgcgaaggaaaccgcgaaggactggaagggcctccgcgtgacggtgaagctaaccgtgcagaaccggcaggcgaaagtgacggtggtgccatccgccgccgcgctggtcatcaaggcgctgaaggaacccgaaagggacaggaagaagacgaagaacatcaagcacaatgggaacatctccctcgacgacg

SEQ ID NO: 1108 - DNA, 358 bp, Glycine max
  Clone ID: V4L-01-Q1-B1-C1
cgtactcattgttacattctataaatcaagttcgatacaaccccatcgcaaaatcagtgtgcaagcattccaatcgctcccaaaatcttttctaatttgttcataactcaataattctcatcatgggctccttgattgttccaggtgaacatgatcacaaactaaagcttgtttctcttccctttgtatcaaccagtcacctcattcgcgtagtagacatagctaggctctttgccattcatggtgttgatgtcaccataatcaccaccacagccactgccgccattttccaaagctctatcgatcgcgaccgtgaccgcggccacgctattagaacccacgttgtcaagttcccatg

SEQ ID NO: 1109 - DNA, 400 bp, Glycine max
  Clone ID: V4L-01-Q1-B1-C2
ctctctctctccaatggccaaagacctcgaaacggagattcaaagtgggttgcctcacaaggactaccacgacccaccccccgccccattctacgaccccgccgagctccgaaagtggtccttcttccgagccctcatcgccgagttcgtcgccaccctcctcttcctctacgtcaccatcctcaccgtcatcggctacaaccaccagacagccaccgccgccgagccctgcagcggcgtcggcgtcctcggcatcgcttgggcctttggaggcatgatttttgtcctcgtctattgcaccgccggcatatcagggggacacataaacccggcggtgacgttcgggttgttttgcgccatgaaggtgtcgctgacaaaagctgttgggtacatggtggct

SEQ ID NO: 1110 - DNA, 411 bp, Glycine max
  Clone ID: V4L-01-Q1-B1-C3
ggccataacttaagttccactataaataactgtcatggcttcactctccactcgtacctaaaattccgaagttctttttcttataatggggctcttgtggaaaactcacacgaggatacacgtgattagaacattttttgcaatccttttggttgcactgctgagttcagagagagtagagagcagaaaagccaaagttgtgaccacttccttggagtacaatgctataaactgcagagctcacagtgctgcattgacagattttggtggtgttggggatggaaaaacatccaacacaaaggcatttcagtctgcaataagtcacctgagtcagtatgcttctgaaggtggctctcagctctatgttcctgcatgaaaatggctcactggtagcttcagcctcaatagtca

SEQ ID NO: 1111 - DNA, 391 bp, Glycine max
  Clone ID: V4L-01-Q1-B1-C4
tttaacttaattaaccaaactgctcgtctcgttccgcgtcgtcgtttcctccaatcatcacaacaacacagtgatggtggcgctgtcgctgttgggggaaaaaatccgaatccaaaggtggtagtagatgacgagaaaagccgaaggcggagaagcatcccagacgcaaacaaactcggacaatggttagaaacatgacacggaagtactgcaaaaagtagaaggagggaagaagaacgctctcatcactttattcatttcatttttggaccttacggagagcccctttcttgtcccttccctctctcgacaccactatttattcttactttctgctctctatctctctcgcgccgcatgttgctcgatttctatttcaaacaacaccgca

SEQ ID NO: 1112 - DNA, 350 bp, Glycine max
  Clone ID: V4L-01-Q1-B1-C5
ttaatggcgaacaatttagatcagactctaaaacagttaaccaacaagctttcttttatgctagtgaacgcgaagtccatcacaacgacatatttatattcggcatagataacaccgtactctctaatatcccatactatgaaaaacatggatatggggtggaggaatttaatgaaaccttatatgatgaatgggttaacaagggcgacgcaccggcattgccagagactcttaaaaattacaacaagctgttgtctcttggcttcaagattgtattcttgtcaggaagatatcttgacaaaatgggccgtacagaagcaaacctaaagaaggctggcttccacacatgg

SEQ ID NO: 1113 - DNA, 392 bp, Glycine max
  Clone ID: V4L-01-Q1-B1-C6
ttcttcttctccttttgtactctcattcacattcttataggctaattaacatacactctcttccaaagttgagtactttgccaaaaaaaaaaaaaaagttttccctttgagaaagaaaacccaaagacagtcttttgatcattttgagcagttgcattccttgttttcttccattttgggtcccctcaaaagtagtttcaaaagggttcctcttcctccacagatatcatggcagatcataccccgggttcaggaaccgtttctgttgaagcttcttcacaagaaagaaggaaacttccaaactttctcctatccgtgagacttaagtatgtgaagcttggttaccactacttgatctcaaatgctatgtaccttttactcataacccttct

SEQ ID NO: 1114 - DNA, 355 bp, Glycine max
  Clone ID: V4L-01-Q1-B1-C7
tgtgcatctgccaaattaggattaggattagggctaccaataccaataccaataccaattctattctatggcttgctcaagcgcccaaatacacggtctcggaaccccttcctcccgaaccctatttttaggtcagaggctaaataccaaggccgcctttatcaagctcaagtccacacctagaagactccgccctctcagagtggttaatgataaagtcgtcggtatcgatttgggaaccaccaactccgccgtggctgccatggaaggcggcaagcccactatcatcagcaacgccgagggccagagaaccacgccctccgtcgtggcctacaccaagaatggcgacaggctc

SEQ ID NO: 1115 - DNA, 386 bp, Glycine max
  Clone ID: V4L-01-Q1-B1-C8
gttccccactcagacttagatgttgagtcgtgcactttcaaccccaacaactcaaagcctcaaggcaacaagaacaaatgcaatgctttatccaactcatagattattgtctcttaaggagttgtttccccaaggtgtggcctgccactgacagaagagaatgtggagaaggttttggatgaggtaaggcctggcttgatggctgatggagggaatgtggcattacatgagatagatggtcttgttgttgtcctcaagctgcaaggggcatgtggatcatgtcctagctcagctatgacattgaaaatgggaattgaaactcgcctccgggataagattccagaaatcttgggagtggagcagataatggacaccgagactggtct

SEQ ID NO: 1116 - DNA, 420 bp, Glycine max
  Clone ID: V4L-01-Q1-B1-D1
cttgctatctgcttcctcgtagtacttcattgagagagacatggacactgtactaagtactacgctgctactcatgttggcatgctccatcgtgcatgttcttcgttcactacaagcaagaatgagaagaaaatcaaactacaatcttccaccaggaccctctcttctcaccatcattagaaactctaaacaactctataaaaagccacagcagacaatggccaagcttgccaaaacctatggccccataatgcgtttcaccataggccaatcaaccaccatagtaatctcctcaatagaagccaaccaagaggttctccaaagccatgactcattattctccgacagaacaaacccgacatcacaacctcgtacaaccacaaccgttacagcttggtttttctccctgtctcacccctc

SEQ ID NO: 1117 - DNA, 386 bp, Glycine max
  unsure (1)..(386): unsure at all n locations
  Clone ID: V4L-01-Q1-B1-D2
tgctgtgttcactcccactctcaaccttgccatttcatccagcacatactgttgtagaagaagaacatcatctaccacaagaagagttgttacagtgagagctagctccacagagaaggatgaatccaaggacaaagatgcttcagcattcaacccttttgggtttgtcactgacaacccttctagccgaaatgccattcaactgcctgaaaaccctgctgaggatggcaacgttggccaaatgctatataggatagaagacaagggcaaggaatatgggtcatatgttaaatctggcaagttaagatggtttgtgagagaaactgggtcagcanatggcagaagaggaacaattgtcntccttcatggggccccaacgcaatctt

SEQ ID NO: 1118 - DNA, 379 bp, Glycine max
  Clone ID: V4L-01-Q1-B1-D3
gtcgttgcacaagtgagagaggttgaaggcggcgtgagaatgttggacatcaacctattcagagaggagaagggccacaaccctgaactcatacgcgaatcccaacgccgtcgtttcgccagcgtcgaaatcgtcgacgaggtcatcaatctcgacaaagaatggcgaaaacgtcaattcgagttggaaaatctccgcaaggaattcaacaagatcaacaaggaagtctccaaactcaagcgtgctggggaggatgcctctaagttcattactgaatcagaggagaacataaaatcgatagcggagaaagaagttgaagtgccggaaactctgaatctcttgaattccaagtttggaactattgggaaacctcgtccac

SEQ ID NO: 1119 - DNA, 408 bp, Glycine max
  unsure (1)..(408): unsure at all n locations
  Clone ID: V4L-01-Q1-B1-D4
tttcttctttctttttctcccgaaatttctgtgtgtgtgtgtgtgtgcgttttggccttttgaagcttccgaggtggcaaagatgaactgatcccaaaatatataactcaagttttacaattcaagccaacatgaatcctgtaataccatgctctattggcaatgtttcaattattcctgtattcatctattcaacaaggaagaataacactttaacaagattcaacttgtcaaggagcactgtaaaacctggatcatcatcttggagatttctattaccttcatttgttgccagtggagcgtttccacaaaacaaaggaatacgctcttttcataagaaatctagcaactccatatcagccacaganacagatgtaacagtggaggaaccaagtcctgttgctgatg

SEQ ID NO: 1120 - DNA, 324 bp, Glycine max
  Clone ID: V4L-01-Q1-B1-D5
gacgttccgtatatgagcctctccaaacaggacgtattgcgagtgattcgatgatccccataggacgtggccaacgagaattaattagtggagacagacagacgggtaaaacagcagtagccacagatactattcgcaatcaacagggacaatgtgtaagatgtgtctatgtagctactggtcaaaaagcgtcttctgtggctcaagtggtgaataccgtacaagacagaggagcaatggaatacactattgtagtagctgaaacagcggattctccagctacattacaatacctcgccccttatgcaggagcagctctggctg

SEQ ID NO: 1121 - DNA, 257 bp, Glycine max
  Clone ID: V4L-01-Q1-B1-D6
ctagatattacaatgacattactatagggttgttctcatcaatgatgggcagccatcagtgatcagacatgtggcttattttcttgttgtgctaggtacaaatttgatacatgtcttatcatgaaaccatgcttactatttatcctcttcaagtacacaacagtctttggatcagaatggtgccacttcacttcgagaaaagaatataccagaaggacctccattacgtagcatagccaaccttacgacactttcag

SEQ ID NO: 1122 - DNA, 310 bp, Glycine max
  Clone ID: V4L-01-Q1-B1-D7
cgaagactgaagcactctctccgatgacagtattcagaaggaatccacacatcagcttggtcgtatgctccgtggtggagaactctagttgcaggttgactcttgccactggcagtttcacttccatgaatgtgtctgatataactggatttctaaggcgatgttgacgttatgctcgatggcggtcatctctagttggagggaatcatacgaatcaagtgcacttcaatattgaatgagctcaatcataattgcaacaacttcagcaatgaggttgctcaatttttggttggtgcgtccattcctgaat

SEQ ID NO: 1123 - DNA, 401 bp, Glycine max
  Clone ID: V4L-01-Q1-B1-D8
gtttgttgtgagctataagctagtttatcgtgaggagaatatgaagttgtttgttttctttgttgctgcagtagttttggtagcatggccatgccatggcgcaggctaccaaaggttccctctccgaatgaaaactggctatggtgagcgttcttcggaggtaaaatgcgcaagttttaggcttgctgtggaagcacacaacatccgagcctttaaaaccattcctgaagagtgcgttgaaccaacaaaggactacattaatggcgaacaatttagattagactctaaaacagttaaccaacaagctttcttttatgctagtgaacgcgaagtccatcacaacgacatatttatattcggcatagataacaccgtactctctaatatcccatactatgaaa

SEQ ID NO: 1124 - DNA, 417 bp, Glycine max
  unsure (1)..(417): unsure at all n locations
  Clone ID: V4L-01-Q1-B1-E1
cgagatcggagaagaggaagaagaagaagaagagtatgggaacgacggtggcgggtctagcgccgggtctgtcacggaagctgaagaaggttctagaatctcggatcgatacgccagacctcttgtcttcgctcaacacgctctcttccttctacgatgacaacactcctcaggcgcgtcgcaacctccgatccaccatcgagaagcgcgccctctccatcaaccgcgaattcctcgacgcttcncacgccgcgcagctggccttggatagcgtggagaacgaggtcgatgcgctcgctgagtgctgtgacaggatagcaaaggctttgaatagttgtagtgctagcaccgctgacattatcggcaacacagagaggctcaaacaagagcttganactactacacagagacaagaga

SEQ ID NO: 1125 - DNA, 418 bp, Glycine max
  Clone ID: V4L-01-Q1-B1-E2
gacattcaacaaacaacgcaatgggtattccgtcggaactgagggacatgttgttgcccaacaaaaagggcgtcctcgttgcctctcccgcagaggacaggaagactttgaggtccaagcaatgcactagggaaggtgtgcgagctggattcaaggctgcttccattgctggtgttgccagtgctgtgcctacattggctgcagttcgtatgattccatgggcaaaggcaaacctcaattatactgctcaggcacttatcatatctgctgcatccatcgcctcatacttcatcactgctgataaaactatcttggagtgtgcaaggaaaaatgccaagcttgaagatgctttgagacacaatcaacaatagttgtcttagaaactgaaagaagtaccatcattgttcttggtgcatga

SEQ ID NO: 1126 - DNA, 373 bp, Glycine max
  unsure (1)..(373): unsure at all n locations
  Clone ID: V4L-01-Q1-B1-E3
cttctctccacgcccttcttgggtaaccgtctgaagtgcagcaatggcagatggattgcattcgcagcatccatcggtagttcagaagttatctggacagtcttatcttgtgtccaggcttgctcctaatcactccagaaactgttctaccactggtagttacttcaatggaggtttgcagtcttcaggtttggttccagtcacggcacacgcgccggctgagaaaggggtgtctggatttttgttggatttcctgatgggcggagtgtcggcggctgtgtccaagacagctgcggctccaatcgaacgagttaagttgctcatccanaaccaggatganatgatcaagagtggtcggtttgtctgaacatac

SEQ ID NO: 1127 - DNA, 391 bp, Glycine max
  Clone ID: V4L-01-Q1-B1-E4
gtttcacgtttcagtcctgatcgagtaaataccaagaagcagcagcgcagtaacgacaccgtttcgatggggaactgtaacagcgaagcctcttcccaaactcagccacattccgatcaccatccccaaccacgctccaactccaacggcatcaccgtccttcctcccaattcgaagccctccgttggccgggtcttgggccggcccatggaggacgtccgctccacctacaccttcggccgcgaactgggccgcggccaattcggcgtgacataccttgtgacccacaaacacaccaaacaacaattcgcgtgcaaatccatcgccacgcccaaactcgtccaccgcgacgacttggaggatgtccggcgagaggtgcagattcatgcac

SEQ ID NO: 1128 - DNA, 298 bp, Glycine max
  Clone ID: V4L-01-Q1-B1-E5
ggaaattgataggatgaaagaagatattcaagcagcaagggagaagaatggtgtctatatttctcatgaaagatttgccaaggaagaagctgaaaagaagtcaaggaatgagaagatagagcaattagagaatgacctcagtcttagtgagaagcaagtggccagcttccgtgaactctatttaacagagcaagaacagaaactggaattagaaagtgagcttaaggattgcaaggtgaatttggaaaaaaccagcaacaccttgcatggcctccaagagaattacaagctattagtt

SEQ ID NO: 1129 - DNA, 397 bp, Glycine max
  unsure (1)..(397): unsure at all n locations
  Clone ID: V4L-01-Q1-B1-E6
aaaacttttgcagaaactgtatgatttgggagcacgcagagttcttgtgacaggcacaggaccattgggttgtgttccatcagaattggcccaacgcggtagaaatggacaatgtgctgctgaacttcaacaagctgcagagttgtttaatccacaactcgaacaaatgttgctacaactcaacaggaaaattggaaaggacacttttattgctgcaaacacaggaaaaatgcacaacaacttcgttactaaccctcaacaatttgggtttatcacgtcacaaatagcttgttgtgggcaaggaccctacantggtcttgggctatgcacaccactctccaacctttgccccaatagagaccactatgcattttgggatgcattttcatcatctgaa

SEQ ID NO: 1130 - DNA, 372 bp, Glycine max
  Clone ID: V4L-01-Q1-B1-E7
ctagtttcttacaaggctctactctactgcttcaccttctgctctagaaaattcagtggtgatacatggcttcggctactctctctgtagccaaaccagcccttcaggcaaatgggaaaggcttctctgaattctctggcctccgcagctcatcaggcttccttcccttttctagaaaatcttcagaggatttccattctgtcattgccttccagacctatgcagttggaagcagtggaggatacaagaagggtgtgacagaagcaaaactgaaggttgccataaacggatttggaaggattggaaggaacttcttgaggtgctggcacggtcgcaaagactcccctcttgatgtcattgccatcaacgaca

SEQ ID NO: 1131 - DNA, 402 bp, Glycine max
  unsure (1)..(402): unsure at all n locations
  Clone ID: V4L-01-Q1-B1-E8
gttttccacgcattttctgttctgttttgttctcattctgtgactctgtgcttagttaacgttaacagtgacttaagatggcggattctgcagatgtcacccacgatgttgtgtccctcctctcttctcctcaaagggactttcttcttcgaaacaacggcgatcaggttaaaattgacagcttgaagggtaagaaacttggtttgtatttttcggcatcctggtgtggtccatgtcaaacatttacgccaactttggtggatgtgtacaatgaggttgcaaaaaaaggtgacttccagatcgttttcattacggctgatgaagatgatgagtcctttaacggttacttttccangatgccatggcttgcaatcccattttctgattcagacaaacgcagcc

SEQ ID NO: 1132 - DNA, 294 bp, Glycine max
  unsure (1)..(294): unsure at all n locations
  Clone ID: V4L-01-Q1-B1-F1
acatttcttctatgcagcataaatataataaaaggattgagtctgtttgagggcctcatattttgagtcggtcggtagtcggaaagtagaccccatagatgctatatgattcctgagccattttttcttttggtgggggaaaatgagttgtgttagtttgggatggcgtcgattgcattgtgggatgttcatattccctgctgtttgaatttgtggacactgccttcccaatgtatgttgcttgtttcataattttattttttttatttatcttgtaaaaaaaaaaaaaatnaa

SEQ ID NO: 1133 - DNA, 409 bp, Glycine max
  unsure (1)..(409): unsure at all n locations
  Clone ID: V4L-01-Q1-B1-F2
cccaatacaaccaaatcatctactccgctacaattccttttcaagagaagcatcttaaatgctcacaattcacaagctgctctagctgcccttatcttttcctccgcgagcctctctgtgaccccacaagcccttgccgctgataacgtcacccctccccctgtaattgaagcccaacagagccaattaaacccctccaactcatcctcccctttctcacagaacctcctcctcacagctccaaagccacaagcctcctccgacctcaccgaaggcaccaactggcgctacagcgagttcttgaacgccgtcaagaagggtaaagtcgagcgagtcaggttcagcanagacggttccggccctcagctaaccgccattgacggccgtcgcgcctccgtttattgtccca

SEQ ID NO: 1134 - DNA, 397 bp, Glycine max
  Clone ID: V4L-01-Q1-B1-F3
tagagataacactaggcagcacaagagaatggcgctgctgtgtggttcaacttccgtgactccattcctttctcacaagaacgttggtttcacaacctcagcaaaatcttcctttgttggctttcaattgccgcttccaaagctcacattatcttcttccgttcgaacccttctgccggcaacatcccgtgtccgttgccagcaagagtctactactgttacccctgtcgcagaagaagacccgcgcttcgcgtgcgtcgaacccgaaccccgattcaaaggcccggacatttggaacaagagctggtatccaaaagctgcagatcatgtgaatacagaaaaaacatggtatgttgttgatgctacagacaaagttcttggaagactagcatcgacg

SEQ ID NO: 1135 - DNA, 390 bp, Glycine max
  unsure (1)..(390): unsure at all n locations
  Clone ID: V4L-01-Q1-B1-F4
gcctaaggattttggctctgcactatgggacatgattagaggaagaggaactgcttacaccataaaaggacatattgatgttgacactccctttggagcaatgaagttgcccatcagcaaagaaggtggtactacccgtcttaagaaaaagaaggaagatcgtgattatgatgatgatgacgatgatgatgaggaatgaagaaatgtagcaggttattactagctataaataaagcgggcattactttctgagttctgatggcgaatttttatgtatcttgagagatcaagttgacattcaaattatgtgctangataagaatcttgaaaatttctagttgtactttaatgatgatcatgacaatctaatgctgttttaatgtgagataa

SEQ ID NO: 1136 - DNA, 304 bp, Glycine max
  Clone ID: V4L-01-Q1-B1-F5
ctcgagccgctcgagccgaatcggctcgaggaagaaagtgcctccacacaaaacgacctggcccactaaggaaattcacttgaccccaaagaaaatcaaaataacttcgcttctccctcttcttctctggtctccatcacttctacacgccagagttgttcccaactttgctgctgagagtatggttccaaaagggacagaatggggtggtggaaactgggaaattaaaacacctactgctgtgaaggatatacctcagtgggagcttgctgcaaaagtgacaacatacatgaaaactgatgat

SEQ ID NO: 1137 - DNA, 367 bp, Glycine max
  Clone ID: V4L-01-Q1-B1-F6
tttctctattgagagatcttgtactccacctgcatcgatggaagtttcacagcaaaagcattacaaggaagaacattctcagggagtggtgcatccaagaaatggaagtcacggttctgtgcctgctcaacatgcttatccatattatatttcaggagttgttaatcacgttatgatgccatcatcggcacaattgtatcaaaagaatatccaggacctgcagattcatgctggttcttctatgattgcacagtacaatcatcttccccaatgtcctcctcatgcgaatgggatgacaaatttcccatattatccaatgaacatttgcttacaacctggtcagatttctactaattcttggccatca

SEQ ID NO: 1138 - DNA, 353 bp, Glycine max
  Clone ID: V4L-01-Q1-B1-F7
gctctgaatccaattcttcttcttcttgttcgctgtttaaggcaatacaacatttactactcatactcaaagtagcttagtgttttgtttagcatatcatggagaataataagcagtcgttttggcaattcagtgaccagctgaggttacaggcatccaatttggcgaacctttctctaaacgattcgatttggagcaacaattacatctccaagaggcgtgatgaaaggattaactttgacatcagagtggggggtgagatcaactctttcaagtcacaggatccagcttgtgattacaacgataacgtgaatggatctcttcttgccatgccttacaccaacatcaacaac

SEQ ID NO: 1139 - DNA, 361 bp, Glycine max
  Clone ID: V4L-01-Q1-B1-F8
ggacattcctgaagtggcctgttacaatgatagagttagacgaaagcaggatactacaaagtgtgcacatgacaagagccagtggagaattttgaaagagaaaaaagaattacaaacaggttcctatagacacaaattagatgacaatgtattgttccacaaggatttgtctcctacaaatcttgaaagatccttgtctgctcctgcatcaggaacatcatttgggaggcttcttctagaggaccgccacattttaacgggcgcccttattcagaggaagcttgaagctgttgaagcaatgcctgtggatgtcaaagtaaagaagaaagatgggtttaatactaaagaaaaactttccaat

SEQ ID NO: 1140 - DNA, 359 bp, Glycine max
  Clone ID: V4L-01-Q1-B1-G1
attctgagaaccacttccatctccactcctatctcttcctccaaatccaaacccattttctcaactcttcttcgttcttctccttccaccattttccccccaaagtccgttactcccaccactcttttcgtttctgccacccccttcttcactctccatcccaagcttggttttcgtggtgggattgtggccatggccgcacctggctctctccgcaaatccgaggaagagtggcgcgcaattctctcccctgaacagtttcggatcctcaggcaaaagggcaccgagttccctgggacaggagagtatgacaagttctatgaagagggagtttacaactgtgctggttgtgggactcc

SEQ ID NO: 1141 - DNA, 408 bp, Glycine max
  Clone ID: V4L-01-Q1-B1-G2
gtttgtaacgcctttgtttgcgttttttgcacagaagaattaacacgtatatagcaagcatggcagtcacactctacgaccttagctctgcctctgggttgaagaagcttgatgagtaccttctcccacgcagctacatcaccgggtaccaagctacaaaggatgatcttactgtttatgcagctttgccaactgctccatcagatgaatatggaaatgtttccaggtggtacaagcacattgatgctttgttgagaatctctggtgtttctggcgaaggatctggtgttattgttgagggatccctggttgcggagcctgttgcaactcccccagctgctgacactaaggctgctgttgctgaggatgacgatgatgatgatgtttatttgtttggtgaagagactg

SEQ ID NO: 1142 - DNA, 362 bp, Glycine max
  Clone ID: V4L-01-Q1-B1-G3
aaaataataacaaaggaatcttctctttctctctctctctctctctttgagttgagtttcgagttgcgccattttcacctgtcctctctctctctctctctctctgtcaccgtgttgcaagtatgaaggactgttggtttttacaacaatttcaatggtctgtcggatgagagtcttgatgatgtgatggacatggagcttttggatttgccccttgactttgaggatgtggaaactgatgctgtggaagaacaagattgggatgctcagctcaaactccttgaagaccatcaccaccacttggagttttcccactacaacaatcctctgcattctgtggacaaactcggaatgagaatgcg

SEQ ID NO: 1143 - DNA, 399 bp, Glycine max
  Clone ID: V4L-01-Q1-B1-G4
gtgtggtctgcaactatgagcaaggattatctaatcatactttctctccttctttccacggtgcttgcaactgcaagttcttcttcttcttcttcctccctctatcttgggaagggcttctcccatcgcagattgtctcccagttatcacattcacaaaaccattgacgaatcctatgcagttatcttcgatgctggtagcacgggaagccgtgtacatgtctatcgttttaaccaacaattagatctccttcgcattggccaagaccttgagttgtttgtcaagactatgccaggtttacgtgcttacgctgagaatccacaagatgctgcagaatctcttattccacttttggaggaagcagaagctgctgttcctcaagagttttcacccaggacg

SEQ ID NO: 1144 - DNA, 178 bp, Glycine max
  Clone ID: V4L-01-Q1-B1-G5
tttctgcgtcaattttgctgaaaaccttaagtgggtatcctgaaaacactagattttcgattcgtttggtaagcggatttttaggtttgattattacgtttttctgttcttgttggatatggaggtttcggtgattggaagctctcaagcgaatctgggagcgtcggaattggcatct

SEQ ID NO: 1145 - DNA, 366 bp, Glycine max
  Clone ID: V4L-01-Q1-B1-G7
ggaattcactctctaaagaaaatccttgtatgattggaatcatatggtttaggatcattctatatctcacgcgttattaactctttttcgtaaattgagaaatgtgatactttcatgtgatgacatggagattaattgagattacatgttctgaatcatggaataatttcttttctcatagagaaattattatatgatcttggagcagcacatgcctattgtccgatcaatctccatataacgtgttaagtagagtttgactgagattatgaatatgtggtggtcccaaactgtataataatttctcaggactaaatattaaatataggagatgttttagttttttcacttctcgtgtggttgttg

SEQ ID NO: 1146 - DNA, 327 bp, Glycine max
  Clone ID: V4L-01-Q1-B1-G8
atcagaacttgatggaatcacacaaggaagtcctaaaaaaccaaggaaccatgaaattcttcactctccaaaccgtgtcccttcaatcaacatggatgtgaaagccaatgaaggaaacaatgagcaacaactctcaatggatcacgataggcagaataatagggatagctactccttcatggggaaccatacaaacttcattagtggctttggacaataccctattgatgaaattggtaggtttgatgctgagcaattcacaccaaggttttcaggtaagaatggagtttccctcactcatggtcttcctcattgtgacacattgtc

SEQ ID NO: 1147 - DNA, 392 bp, Glycine max
  Clone ID: V4L-01-Q1-B1-H1
ctcttctagtgtttctgaaagcgcatcaatgaagatgaaggttctatgcagctttggcggtaaaatattgccacggcctagtgatggaaagcttagatatgttgggggtgaaacgcgtattattagtataagacgggacatacgttttcatgagcttatgcttaaaacatcatccatctataatgaaactcatgtgataaagtatcagctccctggagaagatcttgatgcattggtttcagtatcttctgatgaggatctgcggaatatgatggaggaatgtcatgatctacaaggcggccgaaaatcaaataagcttaagatttttctgttatccatgaatgatttggatgatactcagttcggtatacgtagcatggatggtgattctg

SEQ ID NO: 1148 - DNA, 364 bp, Glycine max
  Clone ID: V4L-01-Q1-B1-H2
ctcgagccggcttttttggatttggagtgggaacttcaattgggctagtcattggctactatttgttcatatacttccagccaacagatgttaaggatccagtaattcaacctttggttgagcaagatgctaaaacattacaactgttgcttccagagatacccacttggattaaaaacccagactatgaccgtctcgactggcttaataaatttatattgtatatgtggccttatctggacaaggcaatttgcaagactgcaaggagtatagcaaagcccattattgccgagcaaattccgaagtacaaaattgattcagttgaatttgaagaacttagcttgggttctctgccaccaacttt

SEQ ID NO: 1149 - DNA, 393 bp, Glycine max
  Clone ID: V4L-01-Q1-B1-H3
cctcttttaaattctacaaaaataatctttagcaactctcttctctgtttttgctactccattctgaaactttctgataccgacacaccgcaggaccatgatgcggtttgtgatgtcttcaagctccaaacgtgtgtctaagtgcttcatttttgtgttcctggcttccctacactttggatccaacgctcaactcttaccacaagatgaagtgaaattgctacaagcaatatcagacaaggtagagaacctgaattggaaagttacacaacgttcttgcaacggggatagaggatttgataacaggaacatttcaagggataataagtctcaaatcataaggaatgtcacgtgtgattgctctttcaacaataacactacttgccatgtgac

SEQ ID NO: 1150 - DNA, 381 bp, Glycine max
  unsure (1)..(381): unsure at all n locations
  Clone ID: V4L-01-Q1-B1-H4
ctcgagccgctcattcctaaagcctcaacgacaacgcgagaaggagctaagagagagaacacacccaacacaacacaatacaatcgatagtttccgattcttaaaaaacccgaaagtacgaggtgatgttcgaatggagccaaacgaggagaacggaggcagcacgagcagggaggaacaggaagaggcattggtggctttgattgaacaccgaacccacgaagtcaaaaaccttcgtcaccgcatcgcttattataaaacccagcttgatgaagcggagaaaaggttgcaagattctgaatccaaattggctcgccttcgaggtcagacagtgtcatctagaagtaccttanatgatggaatcaaaactttaaagacaga

SEQ ID NO: 1151 - DNA, 362 bp, Glycine max
  unsure (1)..(362): unsure at all n locations
  Clone ID: V4L-01-Q1-B1-H5
ctctgaaacttcagaagcggcttgccgctagcgttctcaagtgtggtagaggcaaagtttggcttgaccctaatgaggtcaatgaaatctccatggctaattctcgacaaaacataaggaaattggttaaggatggtttcattatcaggaagccaactaagattcattcccgttcccgtgctcgcagaatgaaggaggccaagaggaatggacgtcactctggttatggtaagcgtaagggtacaagagaggctaggctccccaccaaaatcctttggatgaggaagatgcgtgtcctcagacgattgctccgcaagtacagggaagcaaagaagattgacaagcatatgtancatgatatg

SEQ ID NO: 1152 - DNA, 281 bp, Glycine max
  Clone ID: V4L-01-Q1-B1-H6
tgctacaatgggacagtctcacactataggtttacaggaatccgctaaatagcactctgaggcaaaggatttcacaccttctttgacgctgatagactacagaggtgggaggaattatcacctgcagttttaacggcaatttcagcttcaaaggttgctagtagcgggcattcgtgcaaccatgccagctcctcatggcgttgagatgaccatggtcacagctttcactgcatgagggaatggctgttggtcatcaccgtcatttactaaatcaatccttc

SEQ ID NO: 1153 - DNA, 284 bp, Glycine max
  Clone ID: V4L-01-Q1-B1-H7
gaaaaagttagggtttgtaactttgtcttttgcttgcgaatctgaatcgaataataatcaatcaatcatcatgtcgtcggcgaagaagatcacactgaagagttcggacggcgaggctttcgaggtggacgaggcggtggcgctggagtctcagacgataaagcacatgatcgaggacgactgcgccgacagcggcatccctctgccgaacgtgacgagcaagatcctggcgaaagtgatcgagtactgcaagaagcacgtcgaggacggcgaatcccgaagac

SEQ ID NO: 1154 - DNA, 267 bp, Glycine max
  Clone ID: V4L-01-Q1-B1-H8
gttggagcagacgatggtttgttttaaatgagaagactggcaagcttggatacacaaaaaaacaagaagagagacatttccgaggagtgattacattagaggaatgcaatattgacgagattcctgatgatgatgaagcctccacaaagaattccaaggataaaaagtccaacggacctgattctgggaaagcatcaaaccttattttcaagataacaagcaaggtcccatacaagactgttatgaaatctgaaagtgcagttttgt

SEQ ID NO: 1155 - DNA, 241 bp, Glycine max
  unsure (1)..(241): unsure at all n locations
  Clone ID: V4L-02-Q1-B1-A1
ggcgcagagtgcaatcgaaattcgatggttcaatttcacgaacgcatagtcacagagcttctagaagacaccaatggcggtctggttgttctctcctcaggcctttctctctccaaactcatcccttctcttctaattctacacttctcatctcacggcacgctccttctcctctcacagtcctccacttccctcaaatccaaaatcgccttccagctcanaaccctaaacccccaattct

SEQ ID NO: 1156 - DNA, 393 bp, Glycine max
  Clone ID: V4L-02-Q1-B1-A10
cgtagttctctgcatcatggagatggaacgcgtcttcgagtttcctcacactcacatggatcggcgcccgagaaagagagcgagattgggctgggacatccctgaggtccccaagataagatacatagcaaaatgggtgaaggaacttttgggcaggtcttagaatgctgggatagagaaaggaaggaaatggttgccgtaaaaattgtccgtggtattaagaagtatcgagaagcagccatgatagaaattgaggtgttgcaacagcttggtaaacacgataaaggaggcaatcgtcatgcatgacttgcgcatgattcatactgacctgaagcctgaaaacatactactagtttcaccagagtatgtcaaagttcctgactacaagagttc

SEQ ID NO: 1157 - DNA, 414 bp, Glycine max
  unsure (1)..(414): unsure at all n locations
  Clone ID: V4L-02-Q1-B1-A11
attttatatttaggttacgaggaaattatcatgaatccaattatttctgctgcttctgttattgctgctgggttggccgtanggcttgcttctattggacctggggttggtcaaggcactgctgcagggcaagctgtanaagggattgcacgacaaccggaggcagagggaaaaatacgaggtactttattgcttagtttggcttttatggaagctttaacaatttatggactggttgtagcattagcacttttatttgctaatccttttgtttaatcctaaaaaaatagaaatacatatcctttttttccgtggactttgcttaccggtcttgctttttcgaattctatttatattaatatttcactcctataattctttatccgttcggacaagaacacaggggaaggacta

SEQ ID NO: 1158 - DNA, 150 bp, Glycine max
  Clone ID: V4L-02-Q1-B1-A12
aatatggtagcatagctgtctagtatgatagacacgtctgtgtcgtgttgccgcagttagattcacagtttgaccgtatccatttttgttttgaggttaagtttagttttctctcttggttagtgataataacacgcagttaccctgtaa

SEQ ID NO: 1159 - DNA, 293 bp, Glycine max
  Clone ID: V4L-02-Q1-B1-A2
gaagaaaagggaagaaggagaagaagcggtgaagcgtagaacgaagaaacacgcggaaggaggaatcggcggtgctccaccggcgatcgctcatcgtcgccggcgaacttcagatcgctgctcttgcttctccgaagtttgtgccttgcggtttttttcagaggcatttgttgttggaatcttgtagtacgggtttttttggctcactggtggaaaattgttatagatgggctgaagtgtgcttttcatgggaggtgtggaggatgaagcaccagctctgaaacgcatgaaat

SEQ ID NO: 1160 - DNA, 130 bp, Glycine max
  Clone ID: V4L-02-Q1-B1-A3
ctacagcagaaactcctttccctcaaaaggatctttcattcacctcaaaaggcctctctctgccaactgtgtacctcctttggggactgaggtaccattgccccaacaattaacaacttccgggaattgg

SEQ ID NO: 1161 - DNA, 313 bp, Glycine max
  unsure (1)..(313): unsure at all n locations
  Clone ID: V4L-02-Q1-B1-A4
ttcttcgttgctacaattttggtagcatggcaatgccatgcgtacgatatgtgccctctccgaatgaacactggctatggtgcccgtactccggaggtgaaatgcgcaagttggaggcttgctgtggaagcacacaacatctttggctttgagaccattcctgaagagtgcgttgaagcaacaaaggaatacatccatggcgagcaatatagatcagactccaacacagttaaccaacaagcttacttttatgccatagacctcggagtccatcccaaggacacatttgtgttcagtatanatggcaccgtac

SEQ ID NO: 1162 - DNA, 379 bp, Glycine max
  unsure (1)..(379): unsure at all n locations
  Clone ID: V4L-02-Q1-B1-A5
ttcttcattcatcttttcatcttcttgtctgagagttgtgttgattgattggtgtgacccaaaaaatggctcaattgccaccaaaaattccaaacatgacacccaattggccagacttctcttctcctcaccaaaagatgccttccctcaaaaccatgtcacctaaccaaaacccttcatgggtggatgagtttcttgaattctccgcggcgagacgtggggcccaccggcggtcggtgagcgactccatcattgcaaaggtggcagtgttggtggtggtggcggtagcggcgacaacgagttcgagaggtttgatgatgaacaaatcatgtccatgtttaatgatgaagcttcanggaataattataataataataat

SEQ ID NO: 1163 - DNA, 356 bp, Glycine max
  Clone ID: V4L-02-Q1-B1-A6
gatcacatcacctctgcaattggtgctgccaatattggggcacttggtactgctcttctctgttatgtgactccaaaggaacatcttgggttgccaaaccgggatgacgtgaaggctggagttatagcctacaagatagcggctcatgctgctgatttagccaaaggtcatccatatgctcaagcctgggatgatgcattaagcaaggcaagatttgagttccgatggatggaccagtttgctttgtcattggatccgatgacagccatgtccttccatgacgaaacctgccagcagatggtgcaaaggtggcccatttctgctcaatgtgtggccctaaattctgctctatgaag

SEQ ID NO: 1164 - DNA, 180 bp, Glycine max
  Clone ID: V4L-02-Q1-B1-A7
agagaaaaaaatgtctcttccaagacccagtgagggtaaagccccttctcagctgaaagaaggattacaaccggcggcggctgaagcctcaccctcttcttcagggaatattaggcaaaacacttccctcccttggctctatacacaacaagattcacaaatttgacagtgagaaatatg

SEQ ID NO: 1165 - DNA, 257 bp, Glycine max
  Clone ID: V4L-02-Q1-B1-A8
gttcaccaattcgcgcaatgcatcacttgccacgcttggagccccgatcaatccatggttgctttatgtccaaacaataatgaagtgcacatctataggttggttgaagacaaatgggaaaagttgtatgttcttcaaaagcatgaccaggtaatttctgggatagactggagtgcaagatcaaatagaatagttactgcatcccatgatcggaattcatatgtctggaacctggaaggatcagaatgggtgccaac

SEQ ID NO: 1166 - DNA, 219 bp, Glycine max
  Clone ID: V4L-02-Q1-B1-A9
cattttctctacttcatcgcaggtgacgggcttccttgtatcgcaaatccatgctcctcagcgacagattcctgttggggctgtcttcatatgggggcacatcctcacatgcatcctccataatctcggtgcctctcctgtcatcttgcctcttctgtctactccgcatcacgaagcttaacctctgccgactcacagtaatcttcactgaatgcatgc

SEQ ID NO: 1167 - DNA, 332 bp, Glycine max
  Clone ID: V4L-02-Q1-B1-B1
ggagcagcaaaggcagtggcccttgtcctcccaaccctcaagggcaaactcaatggcattgcactccgtgtgccaacaccaaacgtctcagtggtggacctcgttgttcaggtctcaaagaagacctttgcagaagaagtgaatgcagcattcagagagagtgcagacaatgagctccagggaatcctctctgtgtgtgatgagccacttgtgtctgttgacttcaggtgcactgatgtgtcctcaaccgttgactcatcgttgaccatggtcatgggagatgacatggttaaggtgattgcttggtatgacaatgagtggggctactccca

SEQ ID NO: 1168 - DNA, 280 bp, Glycine max
  Clone ID: V4L-02-Q1-B1-B10
gcggcgtggatgcagggaaaatctccatgagcgaagaagaccttctcaatgcggctggtgagacttacagcgttactttggatgccaagggaacctacagtttctactgttcgcctcaccaaggagctggtatggtgggaaaagtcaccgttaattaattatatattgtctcctacgtctaagttctcatatgcttgttttcctagaagagcctaattcatctttcttgttagggcctatgggatgaatcaacaatataatgcctttgtgtaattcattt

SEQ ID NO: 1169 - DNA, 364 bp, Glycine max
  Clone ID: V4L-02-Q1-B1-B11
gcatttttggatggggcagctccaaatggtctgtttggactaggaatgagcaatgaatctgtcccaagtatcctagccaaagaagggctcacttcgaattccttttcaatgtgttttggatctgatggtcttggaagaatcacatttggggataatagtagcttggtccaaggaaagacaccattcaacctcacggcattgcatcctacttataacatcaccgttacccaaattattgtgggagaaaaagttgatgatctcgagtttcatgcaatatttgactctggtacctcgttcacatacctaaacgacccagcttataagcagattactaacagttttaattcagaaattaaactacaac

SEQ ID NO: 1170 - DNA, 340 bp, Glycine max
  Clone ID: V4L-02-Q1-B1-B12
tttcaatttcactcacaaacccaaaaccaactccttcctccttgccccttctcagatcgccggttccgttaagtcccaaaactcgaaccctagccctaaccctaaccataaccctaaccccagctattcgaattcccctcctcttcgcgcaatcatggcgacgtctttggtgagctccgcgggtgggatgctggcgatgctgaatgagccacatctctcgctgaagcttcacgctctctccaacctcaacaacttggtcgacaccttctggccagagatctccactagtctcccaaagatagagagtttgcatgaagatgaggagtttgatcaacatcaa

SEQ ID NO: 1171 - DNA, 358 bp, Glycine max
  Clone ID: V4L-02-Q1-B1-B2
ttaaggcaatacaacatttactactcatactcaaagtagcttagtgttttgtttagcatatcatggagaataataatcagtcgttttggcaattcagtgaccagctgaggttacaggcatccaatttggcgaacctttctctaaacgattcgatttggagcaacaattacatctccaagaggcgtgatgaaaggattaattttgacatcaaagtggggggtgagatcaactctttcaagtcaaaggatccagcttgtgattacaacgataacgtgaatggatctcttcctgccatgcctacaacaacaacaacaacaacaacattattttgggtgtttgtggaatttgtctcaatgga

SEQ ID NO: 1172 - DNA, 234 bp, Glycine max
  unsure (1)..(234): unsure at all n locations
  Clone ID: V4L-02-Q1-B1-B3
ctggtgcttcatggattcagtttgatgagcctacccttgtcttggaccttgagtctcacaagttgcaagcattcactgacgcatatgcagaacttgcgcctgctttgtctggtttgaatgttcttgttgagacctactttgctgacatcnctgctgaggcatacaagaccctcacatctctgaatggcgtcactgcatatggatttgatttggtccgtggaancaacactcttg

SEQ ID NO: 1173 - DNA, 366 bp, Glycine max
  unsure (1)..(366): unsure at all n locations
  Clone ID: V4L-02-Q1-B1-B4
actctcatggtagtagtagcactactacttcacacactctctctctgagtgcctcacaccagagattctgtgatatatataccaatggaggccctcaatgctgctggcttgacccctctatctgtgctctctgatacaaaaacaacaagaactaaacacccttctgtttctgtatgcaaagtctcaaacttttccacctcaaccaacanaaaacaaaccttgctgcaaagttgcatatcaaaaactttgcatggggggctgattcttgcagcttccgttgtaaatggtggagctgccacagctttaacgtacgatgaagccctgggacaacctttgagcctccctggtgctggggactttgatgtg

SEQ ID NO: 1174 - DNA, 218 bp, Glycine max
  unsure (1)..(218): unsure at all n locations
  Clone ID: V4L-02-Q1-B1-B5
tttagcgcagcttcttctagatttaaggaagatgggtaaggaaaaggttcacatcagtattgtggtcattggccatgtcgactctgggaaatccactaccactggtcacctgatttacaagcttggaggcattgacaagcgtgttattgaaaggtttgagaaggaagctgctgagatgaacaagaggtctttcaagtatgcctgngtgctggacaaac

SEQ ID NO: 1175 - DNA, 161 bp, Glycine max
  Clone ID: V4L-02-Q1-B1-B7
aagtgtgaaaaatttgcaaagcatttgtagccgccaccccactttgtttgtttgtacttaaactacattcccatttgtttttgctttttgagatttcatcatcctgtatttttggtttctgttttcggacttcaatggaaattaatggatgagaactaatg

SEQ ID NO: 1176 - DNA, 323 bp, Glycine max
  Clone ID: V4L-02-Q1-B1-B8
caagtctgtatgcgatagtaatacaggatctgtcaccatcctcacctaatttcaggggcgttaaagttgtcacttcatctattcccattaaacaccccaagtttgctatcactaagagtgtgaactatcttccaaatgtgctctcaaaggtggaagctgaagaagctggtgcttttgtaggcatttggcttgatggtgaaggttttgttgctgaagggcctaatatgaatgtggcctttgtcactaaagataaggaacttataatgccacactttgacaaaattctaagtggctgcacagctaagagagttttacccttgctg

SEQ ID NO: 1177 - DNA, 410 bp, Glycine max
  Clone ID: V4L-02-Q1-B1-B9
gcgagagtcgcgacaaaagttacaatagactcggttgcagttcttcctaaggtgcacccagctgcacacgatcctccctccttcgctctctacttcgttcgtccttctccaccctctcctcttctctgtttctgctctgttccactcgcgactcagagatcaaccacagctcgcttaaccgactatccgaactcttcgttgtaaccgaaatccggtgcacctataaagatccgaatgagggatccgaatctggagttgcaggaatcgggttgggaggagctgcgcaaggaagcgcgcaagatcgagggcgatctcgacgtcaagctctcctcctacgctaaactcggcgctcgcttcacccaaggaggttcacgttatgtggacagtggttcaccacctattggggtcag

SEQ ID NO: 1178 - DNA, 274 bp, Glycine max
  unsure (1)..(274): unsure at all n locations
  Clone ID: V4L-02-Q1-B1-C1
gatgctcttcttccctcaccgatttctcttttgccagattcgattttatttcatttggtttgcagaagattccggtaaacaagatatttatgcttttatttaatttttgttgttttcattgcanggggcaangggctggtttggtgtttctttcatttcactttatatgaatacatagaaaagtttgaagggttttagggatttgcatcatgttaggttcattaccaatattgccactccctgctccctcctctgatggaaatctaagtcctct

SEQ ID NO: 1179 - DNA, 397 bp, Glycine max
  Clone ID: V4L-02-Q1-B1-C10
tggacccccacatgaggtacaccttggagatcaatgccttggctagacagagtttgatcaatgctgatggtatcattgaaaattgctttactcgtggtcgctatgccatggagattagttctgctgcctacaagaacttttggcgctttgacatggatagcctccctgcagatctcatccgcaggggaatggccgtacctgacccaacacagccacatggtctaaagctcatattggaagactacccttatgcagctgatggaatactaatctggtctgcaatagaagactgggttcgaacctatgtgaaccattactaccctcactcaagccttatatgcaatgacaaagagttacaatcttggtactctgagtcaatcaatgtaggccatgctga

SEQ ID NO: 1180 - DNA, 411 bp, Glycine max
  Clone ID: V4L-02-Q1-B1-C11
agatcacccaattatcaaagacttaagtgctgcctgcaagaatgcacctgacagcagcgaagctaagcgagcagttgacctcttatacgacacggctctaatttctagtggattttctcctgacagccctgctgagttaggaaataagatttacgaaatgatggccttggccttgggaggaagatggggtagatcagaagaagaggagggagatgcttctgttgaagctgctgattcaagcacaagtgaagaaagttcagagccagaagtttatgaaccttctgaagtcattgcagagagcgatccttggacaactgattaggcatactatgttctcatagaataagttaaatttttttgtcattataggggattatgcataccaaaaaggtgagaaaggaaagggagact

SEQ ID NO: 1181 - DNA, 378 bp, Glycine max
  Clone ID: V4L-02-Q1-B1-C12
agaaagctatactattggcagatatggcacacatcagtggattggttgcagctggtgtcatcccatcaccttttgattatgctgatgtagttactaccacaactcacaagtcacttcgaggaccacgtggagctatgatattctacagaaaaggggttaaagaaattaacaaacaaggaaaagaggtattgtatgactacgaagacaaaatcaaccaagctgttttccctggactgcaaagtggccctcacaaccacactattactggtttagctgttgcgttgaagcaggccactactcccgaatatagagcatatcaagagcaagttctcagcaacagctttaaatttgcacaggctctgagtgagagaagctatg

SEQ ID NO: 1182 - DNA, 206 bp, Glycine max
  Clone ID: V4L-02-Q1-B1-C2
caatcaacacaattctgagtgcatttgcagttttgagtagttttagcctcttttttttttatatatatttgattttgtagttctttgtcgttttaacttctactctagactttgatagatattagtagtagttgaaggcttcaatttttatgattgcaaatatttcctgtaattagtatttcaaattcttgtattcattcttctca

SEQ ID NO: 1183 - DNA, 371 bp, Glycine max
  Clone ID: V4L-02-Q1-B1-C3
agaaagtaaagataaaaataacatgcacaacaacatgagcactctctctttcgtcatccttctttcaacactactaactgttggttacggtggtcgcgacttaggagataaaaacccgttcaccccgaaggcttacgtggcacgttactgggaccaacacgtccgcaacaacttgccaaagccatcgtttcttctctcaaaagcatccccaatgagcgcttccgacacggcgtcgttcgccaagctcgccgccgcgaacaaactctccaaccgcctgcccgagttctgctccgccgcgcaactcctctgcttcccggaggtccgtcccacctcgagaaacaaccgaagatgcggtttcaaacctacaacga

SEQ ID NO: 1184 - DNA, 350 bp, Glycine max
  Clone ID: V4L-02-Q1-B1-C4
aacctatagaagttgggccagaagatatagcagcagttgcttccctctggtcaggaattcctgtacagaagctcacagctgatcaaagaattcttctgttagatcttgagaatcaacttcggaagcgtgtgattggacaagaggaggctgttgctgccatttctagagctgtgaagagatcccgggttggcctaaaggatcctgatagacccatagctgctatgttattctgtggcccaaccggtgttgggaaaacagaactcgcaaaatctttggcggcgtgttactttggatccggaggagccatggtacgattagacatgagcgaatatatggaacggcatacagtg

SEQ ID NO: 1185 - DNA, 329 bp, Glycine max
  Clone ID: V4L-02-Q1-B1-C5
tagtgaagaaacaacataatacaaccataactctactcatctaacaaaacaggaaatcacatcctcctcatagaatgactactacaattatatttgtgaggaaggttatctaaatctatacagggatactgctagctgagaatcttcgttttgctatcaaaaactgccattcccattttcagtgaattgcccaaatctgtgaagaaatttattgccggtatggtacgacggaacattgagcaagatactcaattgaccatcaccgtaaggcattcacgaatgccgtcaatgaatcaacatctctcttttctgaagggtacttaattggt

SEQ ID NO: 1186 - DNA, 312 bp, Glycine max
  unsure (1)..(312): unsure at all n locations
  Clone ID: V4L-02-Q1-B1-C6
aattatatggccgccagtggtgaaaaagaataactcgatcgtcgacaacttgatcgtcaacaacttgataaaagtttatacggcagttgcaagcaaaaccaactctagcccagactccttcctcgggccagcattcgaagttggttctgatcctaagaaacactttggatctctggaatctttgcacaatactgtccacagctggaccggtgaattagaaaaacctaaccacgacatggggttgttggctacggctgcaagagatccattttccttgctcaccattcanacgtcgataggatgttggacata

SEQ ID NO: 1187 - DNA, 111 bp, Glycine max
  Clone ID: V4L-02-Q1-B1-C7
aagatgagtgcagtgaagatatcaaggtgtaaagtctggtagccaatcttcccgatcatgtagagcaaccatgtgtctgcacacctgatctcgaagggacagatgtacgct

SEQ ID NO: 1188 - DNA, 251 bp, Glycine max
  Clone ID: V4L-02-Q1-B1-C8
ggcagtgacattgcaaaggacaccagaaacgaggaggtgtctatgcatgaaaaggtgtactggaaggagtttggacttcttgtttttgtttgggtttcattccttggaagacagattgccatgaaccagacaagcagatgttcaacaatatattgggtactgaacatgttgcagattccaatttcagttggggtatctggatatgatgcagcttccttgtataaaggacggagacattttcttcagtggga

SEQ ID NO: 1189 - DNA, 381 bp, Glycine max
  unsure (1)..(381): unsure at all n locations
  Clone ID: V4L-02-Q1-B1-C9
gccagctcttcttatggaaacgaagagtttgtgagcatggcagaaatcatggaggcagaagatcatgaccgggacagagttcatgtagtgtttggtttgtcaaatgagctctcggttccaggtttaaaggtgggtgttatctactcttataatgacaatgtcgtggctgcttctagcaaattggcaaggttctccactgtttctgccccaacccaaagattgctcatctccatgctctcagatacaagttttgtgcaaaattttattgaggttaacagattgaggctgcggaaaatgtataatacatttgttgcagggctgaagcagttggggattgagtgcactangagcagtggtggtttttgctgctgggctgacatg

SEQ ID NO: 1190 - DNA, 261 bp, Glycine max
  unsure (1)..(261): unsure at all n locations
  Clone ID: V4L-02-Q1-B1-D1
tacaaggaagctgtgagaatacctggatttcttattttaagcattgaggctcccatcaattttgccaacatcacatatctcaacgagagaacgttaagatggattgaagaagagtgaactcaaagcgacagctgctgaaaaagtggagcagataacagcttctctagggacatcatcatctgatggcatcccatcatcagaagcctcagacaggatcaaagctggtttcattcacttcangaaggagaaatacgacaagaa

SEQ ID NO: 1191 - DNA, 300 bp, Glycine max
  Clone ID: V4L-02-Q1-B1-D10
ctctgagcacagcagatgccacattccaaaatcttgattcatcagaaatttccctcactgacgtcagtcattactttgactcagacccgactaatctggtacaaaatctaaggaaagatgggaagaagcctagtgcatacattgctgatacaaccacagccaatgctcaggtacgtacactttctgagacggttagacttgacgcaagaaccaagctgttgaatccaaagtggtatgaaggcatgttgtctactggatatgatggtgtacgcgagatcgagaagagactcaccaatacag

SEQ ID NO: 1192 - DNA, 381 bp, Glycine max
  Clone ID: V4L-02-Q1-B1-D11
acctgattgcgattatagtgatgctgaccttgttgtcgagggaattccggttagtgttcatcgatgtattctggcctctaggagtaagtttttccatgaattattcaagagggagaaggagtcatcagaaaaagaagggaaattgaagtataacatgaatgatttgttgccttatggcaaggttggatatgaagccttcctcatattccttggctatgtatatactggtaaactcaagccctctccaatggaggtgtctacttgtgttgacaatgtttgtgctcatgatgcgtgtagacctgccattaactttgctgttgagttaatgtatgcctcctccatttttcaaataacaaaattggtatcacttttccagagacg

SEQ ID NO: 1193 - DNA, 284 bp, Glycine max
  unsure (1)..(284): unsure at all n locations
  Clone ID: V4L-02-Q1-B1-D12
cagtgatgagtttctcagagaatcatctcctgggtttgatgttcttgtagctgatgaacttaggaattctgattactaccatggggaagatgaattcggtaaagcaagaggtcaagatgaaaggaacttagactctttgaatgaatatgatttaggacattctggtgattatagtttagcagctgatattgatcgagaaagattccgtgggcctcaaggttatgagtcatatgatcacatgcaggagccatatgcttgggagcagcatangaagccctcatccc

SEQ ID NO: 1194 - DNA, 321 bp, Glycine max
  unsure (1)..(321): unsure at all n locations
  Clone ID: V4L-02-Q1-B1-D2
ctcgatctcacgatggctcatttggccctgtctcagatggctgtaactgttcctgttggcaacgatttgtctctcagaagatctgcagttaaggcccctaacttgaacttttgggataaatcatgggcaccagtatttactttggacttgaagccaaacaacccaagtttaagaagtcgtcatgtggtatgcatgtccgtgcaacaagcaagtgtatccaaagttaatgtctcacctttagaattggnagatgctanagaacctccattgaacttatacaagcctaaaagaaccctatacagcaacaattgtttctgttga

SEQ ID NO: 1195 - DNA, 365 bp, Glycine max
  Clone ID: V4L-02-Q1-B1-D3
gcgtgcgtcagttcccggccaccaagcgccgccgttaacctccggcggcacctcccacctcctcccaagcccagaaaactgaccctcaaaaccaacaaccgctccaagtgggccattcaattgagcctagtggagcaaagcccaccaaaatcaacgttcaacatgcagcaactcgtgggctttctctacgacgatctaacccacctcttcgacgatcaaggtatcgatcaaacggcctacgacgaacgcgtcttctttcgagaaccaatcagcaaacacgacactttgagtggctacctcttcaacattgcacttctaaaaaatctcttcagggcccaatttcagttgcattgggtcaaaccgac

SEQ ID NO: 1196 - DNA, 264 bp, Glycine max
  Clone ID: V4L-02-Q1-B1-D4
cactctctttgcctctctgactcccacctctgcttaagggttaggttgcacttgtattatagaatgagtagaccgacaacacggagtaaaaataaaagacagaaacaaggggatgatggcaacggcactggcgaaatatggaggaaaattcataatacaggtgtggtaactgaggatgatatgaatcaattgtatatgatttggaagccagtttgttcaagctgccgtgtcaataataaagataacccaaattgcttatgtgca

SEQ ID NO: 1197 - DNA, 302 bp, Glycine max
  Clone ID: V4L-02-Q1-B1-D6
gcctgatgctgccgccgccaacggcaaaaagagaagacgctatcttcctcataacaaggcagtgaagaagaagggttcgtaccctctgcggccaggcgtgcaaggttttttcatcacttgcgatggcggcagagaacaccaagcctctcgtgaagctctcaatattctcgattccttttatgaagagctagttgatggggaacattcaagtgtaaaggagttacccagcaaacctttaaataaaaaaatcacgtttgcagattctgactcttctagtagcgatgatgatgatgatgatgatg

SEQ ID NO: 1198 - DNA, 377 bp, Glycine max
  Clone ID: V4L-02-Q1-B1-D7
gtctacaccgttttctccgccactgatcctaacatgaacgctatggactctcatgttcctgtgttagcaccacttcccattgggtttgccgtcttcatggttcacttggctacaatccctgtcactggaaccggcattaaccctgcaaggagtttcggaccaactgtgatcttcaacaacgacaaagcctgggacgaccaatggatttactgggttggaccgtttgttggacctgcggtggctgcaatctaccatcaatacattcttagacgttctgcaatcaaagctcttggatccttcatgagcatcgcttaattaaaagcaaacaaaatcaagtttctccactacctaaattacgatgatatggtcctgtgtca

SEQ ID NO: 1199 - DNA, 328 bp, Glycine max
  Clone ID: V4L-02-Q1-B1-D8
gttcaaaaaagagactcacgttcttttctttttagctacatatggtgatggtgagccaactgataatgccgcgagattttataaatggtttacagaggggggtgagaaaggagaagggtggcttcagaatcttcactatggtgtgtttggccttggaaacaggcagtatgagcattttaacaaggtggcgaaggtagtggatgacatgctcgttgagcaaggggggaagcgccttgtgccagtgggtctaagtgatgatgatcaatgcattgaggatgactttactgcatggaaagaagaactgtggccagcattggatgaattgctt

SEQ ID NO: 1200 - DNA, 337 bp, Glycine max
  Clone ID: V4L-02-Q1-B1-D9
ccgtctgggtctccctaattttcgcctcatatcctgttcttctcgatccattggtgatggcatcgatgggttctttaccgtttctcgtggaggccaatgctgactccactgtgatgatgatgatgcttcacaataggaatcacaagttttcttcatcaaagtttagcactctgaatgcttcatcgttagtaagagggtgggggcgtggaagagtgaaacataggtgtagtagaggtttgttgtgtttggtggagaagaataagcacataagtgctttagggaagagttctgggacaagtgaggataacgatgattcagatgaagtgcttcaagccac

SEQ ID NO: 1201 - DNA, 355 bp, Glycine max
  unsure (1)..(355): unsure at all n locations
  Clone ID: V4L-02-Q1-B1-E1
gacaattttagttcctgtgtactcacaaatgcggtccatagcagcatttatgacttttctacttccctcaaaggtatccttttgggaaaaacttttggacttgtcatcaaaggatttctttatgagtttttcttgggaccttttacttgtccatcgctcccagatgttgtcttccaatttattcagatgactaattgcatagtataatgtatttaattgaacacaaaggcagattgaagccacaggtctgctccttttctttggcttcaattttgtaaggtttgattttgaagangaagcatacagtggtattatagtggagatctgggacttgttttgcctcctatgccctatg

SEQ ID NO: 1202 - DNA, 297 bp, Glycine max
  Clone ID: V4L-02-Q1-B1-E10
gagactcactcactcactcacctccatttccattgtcactgctccttattcggatctatctcacaccctttctctcttttcttcttttctttcgttttcccttcgcaagtgagagatggcgcaaattctgcttcatgggactctccacgccaccgtcttcgaggttgataggctcaatgctggtggtggtggcggcaattttttcagcaagctcaagcaaaactttgaggagactgttggcatcggaaagggagttactaaactctatgcaaccattgatctggagaaagcaaagag

SEQ ID NO: 1203 - DNA, 378 bp, Glycine max
  Clone ID: V4L-02-Q1-B1-E11
ataagggcaaacagcaagtcctacccctaaccctaacttggaaccttcttccttcagattcatccgtaccgctagttatattactggattcggggcagattgctgttaccgtgtttctccgctttcatttataagatgcacttctggtcatcattttaccaacatgcatgttttgagttgttggtttttgaatatcaatggacgccaaacggttcatccagctggttgaggagaagtagaagaagattatggagagaaaggaagctcctctgatatgggagcagaaactggaagctgctgctgaaactaaagagaggaagctgaaggctacaaagcataaaaaaagatctggctctgatagtgacagtgataatgaca

SEQ ID NO: 1204 - DNA, 400 bp, Glycine max
  unsure (1)..(400): unsure at all n locations
  Clone ID: V4L-02-Q1-B1-E12
gcctcgtgctgtgtttttgctggaagtgaatggaatcaatggtctctggccttggattaattataataatcaaattctatattggttctctctttcgtaaaaagataatagtgtaatgtattatgaatgcaggtcttggaaatattgtccaggataatccaatgttcagcaattcattttggagtacaaattcagataaagttgacattcaacttccagatgaaaatgatgtttctgtggtttctttggatgagcaactggaagactggactgacaaagaaattagtgattttgttagttttgatttatattatacatgcctatgagctaattctgcattatntgattattacgtttcttgtggaaatgactttgtcattgttttcttattcatcttcga

SEQ ID NO: 1205 - DNA, 322 bp, Glycine max
  Clone ID: V4L-02-Q1-B1-E2
ccaaacagccgattccgttaagtgtttctaccgtagcgctcaggaaggaggcattggctggtggtgttggttgtggtggaggtggttttgccgatcagttgtggtagagggtaggaaagaaaaaaaaagtggaaaatgagttcagacagccgcagcaggagcaggagcagaagcaggagcccaatggaccgtaagatccgctctgatcgattttcctatcgagatgcaccttacaggagagattcacgtcggggtttcagccgagacaatctgtgcaagaactgcaagaggcctggtcattatgcaagagaatgcccgaatg

SEQ ID NO: 1206 - DNA, 128 bp, Glycine max
  Clone ID: V4L-02-Q1-B1-E3
ttggtggcattctatgatattatgtttttatgtattttggtgtatcactccttgggccttgtttgcctttaatgagagtggcttattaatatcaatatatcacctaccaaacttattgctagcaaaaa

SEQ ID NO: 1207 - DNA, 260 bp, Glycine max
  Clone ID: V4L-02-Q1-B1-E4
tgtgttcgtgcgtggagtgccgtgtgtgtagccgcgttctctattgccggagttctcgtcggaatttcgtttattgaattttccgatcaccggattcgatgcaatccctaatccctaattctgcgattccatcaattgaaattgaatatccattgaaacgtttcgtttcggacgtggcggatatggacgattacgcgagcatcgacgacgattaccattacgactccgatgaggaggactccgtctaggcctacgaagac

SEQ ID NO: 1208 - DNA, 239 bp, Glycine max
  Clone ID: V4L-02-Q1-B1-E5
atcattctgctgcgattaaggatctggtgggtgggtactatgatgccggggatgctatcaagtttaactttcctgcttcgttttccattactatgttgagttggagtgtgattgagtatagtgcaaaatatgaggctgctggggagcttgaacatgttaaggagatcattaagtggggtactgattattttctcaagagtttcaatagtactgctgacaccatcaccaaccttgctgct

SEQ ID NO: 1209 - DNA, 288 bp, Glycine max
  Clone ID: V4L-02-Q1-B1-E6
tcccttgcagcatccactgctgctgcttcccttggcatgtcagaaatgcttggaaaccccatcaacttcagtggtgccacaaggccagctccatctgcttctagtcctgcctccttcaagactgtggctcttttctccaaaaagaaggctacaccaacacctccaaaaaaagctgctgctgctgctcctgccaatgatgagcttgccaagtggtatggtcctgacagaaggatcttcttgcctgagggtctcttggaccgatccgaaatcccagagtacttgaccgga

SEQ ID NO: 1210 - DNA, 293 bp, Glycine max
  Clone ID: V4L-02-Q1-B1-E7
cgacgttgccgctttgaggaagaccagagaagatgaaatggaggggctgtttagtttgcagggcgtgctgaaacagcgcgaggagagtctcaataggggtgtgaaggagatgcagcaggagatggaggctttggagcagcagttacagatggtgttgataaatactgatgttttggacgggtggttgagggataatcaggggaagaagatggccggtttggagaatcccgatgatgcttttgagtgtgcggatgtgctctccaagcagatgcttgactgtactgctgctgatt

SEQ ID NO: 1211 - DNA, 371 bp, Glycine max
  unsure (1)..(371): unsure at all n locations
  Clone ID: V4L-02-Q1-B1-E8
aagagagactttgtctttctgggtgaaggcattctctgaagatacagcgaaaaggttggaaaattttggatttatacagttcagaccaggaggggagtatcatgcaaataacccagaaatgtcaaagttgctccacaaagctgttcgtcagaaaagtcaaagtgccttttcagtttatcagcaatatttggctaatcgacctgtgaatgttctccgtgatcttcttgaattcaaaagtgatcgtgctccaatacctgtggggaaggttgaacctgcttcatctattgtgcaacggttttgcacanggggcatgtcacttggagctattttcagagaagaccatgaagcaattgcaattgccatgaacagaa

SEQ ID NO: 1212 - DNA, 349 bp, Glycine max
  Clone ID: V4L-02-Q1-B1-E9
cacccacccatccctcgtttcaaaaaaagggccgttattgttgttaccatccaaaaaatggccggtcttgttgtttcttcccaatgctttctcaaactcttgcttgtagtttcagtctttcatgtttcctttgctgctaggaggttgaatgagctggttcaggaccagtctcagttgctacattaccacaatggtcctcttctatacggcaaaatcgccgtcaacctcatctggtatggtaacttcaaaccatcccaaaaggctatcatcaccgatttcgttacctcactgtcatccccagcgtctcagagcagcaaaccctctgtttgcacgtggtggaaaacacgga

SEQ ID NO: 1213 - DNA, 369 bp, Glycine max
  unsure (1)..(369): unsure at all n locations
  Clone ID: V4L-02-Q1-B1-F1
gttttgctgctgaggcaaactacgataaagagctttcataagcaaagacaacccaagtagggtatctgatctgatacaacactagtgccaaaatccatcttcacccacaaaacaaaacaaaagcttcaaactttggcaccaatctagcaacccagttgccggaagtcncattttccggcgaagaatggcggtggagagtgacaaaacgggttctgttgggaaaggttggagcttttgcagcatgccattttggcaaacaactcatgcttcttcaacttcttcaacaacaactttttctatgcatcatagcgttcaccatcagagccagattcttcagtctcctgatagatccaccatcaactttcaaca

SEQ ID NO: 1214 - DNA, 404 bp, Glycine max
  Clone ID: V4L-02-Q1-B1-F10
ctgaaacagagcatggctcctctcacattctccttcttcttcatccttatctcttacatttcttcatcatcagaagcgggatcaatcggaataaactatggaagaattgcgaacgacctacctacaccggcgaaagtggtggagcttcttaagagtcaggggctgaaccgtgtgaagctctacgacaccgacgccaccgtcttaaccgcgtttgccaactcaggaatgaaggtggtggttgccatgccaaacgagcttctcgccaacgccgccgcggaacagtccttcaccgacgcgtgggtccaagccaacatctccagctactaccccgccacgcaaatcgaagccatagccgtgggaaacgaagtgttcgtggacccgaacaacacgacaaagttcctcgt

SEQ ID NO: 1215 - DNA, 354 bp, Glycine max
  unsure (1)..(354): unsure at all n locations
  Clone ID: V4L-02-Q1-B1-F11
cagaaatataaaagtttatttcctctgatcgtgtggtttctgagttctaagcactcacctctttcatacacgtttgttcgcttgttgagaagccatgggcgaggatttcgagttcccaagtgctggcaacatggaaatgcctgaggaggaagagtttgagagtccgatcctgaaggttggggaggagaaggagattgggaaaatggggctgaagaagaaattgctcaaggaatgtgaacgttgggacanccctgacagtggagaccaagttgaagtgcattatactggaaccttgcttgatggaaccanatttgattctagccgcgattaggggcaccccttcaagttcaagct

SEQ ID NO: 1216 - DNA, 402 bp, Glycine max
  Clone ID: V4L-02-Q1-B1-F12
ttcttagaaatgcagtaagcaagacacacaatcgtatttctgatctaaggaaagaaatattatctcttaaaaagaatttttcatctgctgaagaaactgcaaaggaggcaaaagcagagttagatgctgcagagtcaaaacttacactagtggatggcgaaccagttcttggtgacaatcctactagattgaatagattgaaattacatgctgaaaagacaaagaacgaggtggtgtctcttcaaaaatcttcagaagccaaggaagctcttcttgcccaagcaatggaggaaaatgaggcattgtttctcttgttgtacaaaagcttctcaaacgtgttgatagagcgccttcctgaaggagctagaacactgcatgagttgaagtctgcacaagttgatg

SEQ ID NO: 1217 - DNA, 287 bp, Glycine max
  Clone ID: V4L-02-Q1-B1-F2
caaaaccccctttcaaatttcatcatgtccggctatcccaaccagcctcccagctacagctacggcgcgccgccgccgccccaaccctacggtgcccatccgccatcgcaatcatacggggctcctccgccatcgcaatcatacggggctcctccgccaccgcaaccctacggcgcgccgccgcccgctcagccctactccgcctccccctacgcccaaccgtccgccccctacgccgccccctacaacaaacccccgaagaacgagtcccactcccacggcggcgg

SEQ ID NO: 1218 - DNA, 291 bp, Glycine max
  Clone ID: V4L-02-Q1-B1-F3
gtggcttgtgtatattttgcactgttgcggaaatgaacgaaaagaagaatactgcctctactctcaagcgcattttagtgaattgttcatctcaggcaaaagcatatgggagctgtgttgcagcgaaggttccagatattgaacgtgatatgtgtgtgaaggaatttgaggcactaaaaagttgtatgcagaatatgctaaaaaagaaggtttaagtgaactcgctcttgtgttcttgttctgggagctgctgataaagcaaactagaacgcttgacggttatgaataata

SEQ ID NO: 1219 - DNA, 363 bp, Glycine max
  Clone ID: V4L-02-Q1-B1-F4
ccgcgaaggaaagaaactctatccttagctatcgcgatggatcggtaccagaaggtagagaagccaagagctgaaactccaatcgatgaaaacgagatccggattactagtcagggaaggatgcgtaactacattacttacgccatgagcttgcttcaggagaaaggttctaatgaaattgttttcaaagcaatggggagagctatcaacaaaaccgtgacaattgtggagttgatcaagaggaggattgtgggcctccaccagaatacagcaattggatccactgatatcactgatacttgggagcccctagaggaaggcctccttcctttggagacaacgaggcatgtgttcaatgataca

SEQ ID NO: 1220 - DNA, 307 bp, Glycine max
  Clone ID: V4L-02-Q1-B1-F5
tgccaccaccgtttcccatggcgtctgtttggacactgcacttccgctctctttctcttcgcccatgcctctacattagtagcaattgcagtagcgctgccactagaaatcgcattagcatcagaaatcgaatctccaattggcgctcttgcgcccaacaagtcaaacacgattccatcaattccattaccaaatttcaccatcaacttgttcattccgttaccattcctccattcctgttgaatcaaaatggtggaagcaattttccgatttgggtatgtgtttcggttgtggttttggttgtggc

SEQ ID NO: 1221 - DNA, 336 bp, Glycine max
  Clone ID: V4L-02-Q1-B1-F6
gaaagaaagaagaagaagaagaagaagaagaagaagatgttgagggttgcagctagaaggctctcttctctctcctcctcctctccgtggcggcccaaccacgccgcttccgcttatgtctctcgaaacgcagtcgttgatgaccgcagatccgatccttcctcccatcccctttttcccttcagaggttttgctactgaatccctgatccacccaatagaaaacagcattattcctgagattcctgcaactgttactgctgttaagaaccctacttctaagattgtctatgatgagcacaaccatgaaagatttcccccagggtgaccaagcaag

SEQ ID NO: 1222 - DNA, 269 bp, Glycine max
  Clone ID: V4L-02-Q1-B1-F7
gaaggcctatcaggcctttgtatctcacatggtggagggcgtcgatgccaagctcctggatgtacaaaaggggcacaggggagcacaatgttttgcaaagcacatggtgggggtaaacggtgtactgcaccagggtgcaccaaaggtgctgatgggagcaccccatattgcaagggccatggagggggaaaacgctgtacataccagggtggtggagtatgcactaaaagtgtgcatggaggtaccaacttctgtgtggcacatggggg

SEQ ID NO: 1223 - DNA, 368 bp, Glycine max
  unsure (1)..(368): unsure at all n locations
  Clone ID: V4L-02-Q1-B1-F8
ctcatgacgtaggcatgatttgaatttggaggatgtgttttttgtctcgttccgatgcagcttagtttttttggttttcttctgcttgtccgaaaactcgacaagtcgtagttggtagttccaataccattaaagggtcgattcgctgtggcctgcactcttcagaagagatagggaagagatctatctactgagattaataattaattttttaagagaaattagatttaaacattaattatatctgaaattttctctacaaaaatgaattttatttggacaacanaagagaaatacttttgtagtataataaaatacagatatgtgcgttaaaacatgatttctttgggagttaatattattaactt

SEQ ID NO: 1224 - DNA, 219 bp, Glycine max
  Clone ID: V4L-02-Q1-B1-F9
gtaaatatgtggtacaaagaacggggctcgctgttggtcacgttcctgtgtcctgagaaaatctgaggagtgaatacgattacctccagagaaaaagggtggtagccaattactccactcatgatgtagggcatttattcacagccagttactttattctttcaacaattcattatatttcatcgacttcaagattttcataatcttgatataagctgt

SEQ ID NO: 1225 - DNA, 324 bp, Glycine max
  unsure (1)..(324): unsure at all n locations
  Clone ID: V4L-02-Q1-B1-G1
agaagatccaacccaggcacgattccagctccgaatccgaagaagacacgccgccgcagcaactgcaaccggagcaactcgaactaggcgacaactccgattccgcgtcggagctctcttctgtcagtgacgatcctttagccgacgatttcctccaaggaagcgatgacgacgaagagaaagcctcaggttcggagtcaggtttggagtcaggttcggattccgattcggatgacgatgacattgaaaagaagtcgagagctattgatgaagagaaggcgagagaggaaaagatgcngatgccgaatgcagctcaacatcaac

SEQ ID NO: 1226 - DNA, 377 bp, Glycine max
  unsure (1)..(377): unsure at all n locations
  Clone ID: V4L-02-Q1-B1-G10
tctgattccatttccaccatcatcaccatgtccaattctgaacacaacatcatcactggaaatgctggctatgtccttgaagatgtccctcatctatcgaactacatccctcacctcactacatatcgtaatccattgcaagacaatccttcctattcagttgttgaggagcattctgttgatgtggatgatactattgcgcaaaaggcaagttgttgttgttgttgttctctctttcattacagtgttcctgaattgttaattcagtgtccaagtagttgtacataagaatagcccaagagagactcattttcgccgtgctgggccgcgtcagaaggtatatttcgagtccgaggatgtgtatgcttgtantgtca

SEQ ID NO: 1227 - DNA, 302 bp, Glycine max
  Clone ID: V4L-02-Q1-B1-G11
aatgaatcctaattttaggatgaccgacccctttaatccagtccatataatgtccttttcgggagctagaggaaatgcgtctcaagtacacgaattagtgggtatgagaggattaatgtcggatccacaaggacaaatgattgatttacctattcaaagcaatttgcgcgaaaggctttctttaacagaatatataatttcttgctacggagctcgtaaaggggttgtagatactgctgtacgaacatcagatgctggatatcttacacgcagacttgttgaagtgggtcaacacattgttg

SEQ ID NO: 1228 - DNA, 404 bp, Glycine max
  Clone ID: V4L-02-Q1-B1-G12
agtttgcgcacctcgaccggtatcggtgtctccgccgtcaccgcctccggcggagccggtggagcagcgggggaagcaaatgttcaacgcggagttcttgagagtgatgcaagagatgataagaaaggaagtgaggagttacatgtcagggatggaacagaagaatggcttcagaataccaaccgaagcgattgggaacgcggtggtgaagcgcatgggaattagcaacatcgagtgaaggaaagaaacaaaaaacaggaaaaagagaataaaaaacggtgtcgtttcgagattcgaatcaagccaactgaacatgaatgatgaatgatgatgaatcacagagtagagaaaagtgagaaccgagaaagagaaacggtggtgttttttttttttaaacttttttt

SEQ ID NO: 1229 - DNA, 332 bp, Glycine max
  Clone ID: V4L-02-Q1-B1-G2
ctgaatgttccttgttctgcttcttcgcgttcatcgaatgtgggaagaaaaagctttccacgcagcctttcattctctgcatcacaactttgtggagacaagattcacacagattcagtttcattcgcaccaaaaatcggtcgcaatcctgtaattgttacccctaaagcagtttctgattcccaaaactcccaaacctgtcttgatcccgatgctagcagaagtgtgcttggcattatacttggaggtggtgctgggactcgtctttatccactggacaagaagaaggaaagccagctgttcctcctggagctaactataggctaattgac

SEQ ID NO: 1230 - DNA, 293 bp, Glycine max
  Clone ID: V4L-02-Q1-B1-G3
gacgagaaactcgcccaactcgtcaacactgcaccggcgattccccggctcggcatcccgagttaccagtggtggagtgaagcgctgcacggcgtcgccgatgccggcttcggcatcagattcaacggcaccatcaaatccgccaccagtttcccccaagtcattctcaccgccgcttccttcgacccaaacctctggtaccaaatcagcaagactattgggaatgaagcgagggcggtgtacaatgcggggcaagcgacggggatgacgttctgggctccgaacataaacgt

SEQ ID NO: 1231 - DNA, 302 bp, Glycine max
  unsure (1)..(302): unsure at all n locations
  Clone ID: V4L-02-Q1-B1-G4
gaatggctgccaacacattgatgagttctgccatctcagccttcccatctctcctttcctcctcaaaatccagatttgccgcagcagttcctctttccagctttgttgtcaccaatgcctcttcttctcgcttttccatgagtgctgactggatgcctggccagcctagacccccctaccttgatggttcagcacctggtgactttggattcgaccctcttcgtcttggtgaagtaccagagaatcttgagaggttcanagagtcagaactcattcactgcagatggggcatgcttgctgtt

SEQ ID NO: 1232 - DNA, 291 bp, Glycine max
  Clone ID: V4L-02-Q1-B1-G5
tttttcgagaatactaagttgaaacacaatggtacacgcaaacataaatatttaaaaatataatttgtaccgataaaacttcaattcacggtacaaaaacagttccgtacgatttttttgaagataaaccaaagtcaaaatactacaatattttgaaagggaagaaaataagaaaaagcaggtggcgaaaacagaactccatttggtaattaaaatattctgatcagtaagtagcatttcattataaacacgccaattgcatcagctccttaaacttcagaactcagaaga

SEQ ID NO: 1233 - DNA, 330 bp, Glycine max
  Clone ID: V4L-02-Q1-B1-G6
agaaagaaagatatgagataattccttctttatcttttttcatagcagtgaagaaaaaactgagaaagcatgggcgtggactactacaagattcttcaggtagatagaagtgccaaagatgaggatctcaagaaagcatatcgaaggctagccatgaagtggcaccctgataagaaccctaacaacaagaaagaggctgaagctaaattcaagcaaatctccgaagcttatgatgttttgagtgatccacagaagcgaggaatttatgatcagtatggtgaggaagggttgaatggggtgccgccaggcgcaagtggttttcctggtggt

SEQ ID NO: 1234 - DNA, 374 bp, Glycine max
  unsure (1)..(374): unsure at all n locations
  Clone ID: V4L-02-Q1-B1-G7
tcagatggctaaagcgcctgttcagaagtttgctgatcgcatttccaaatactttgtgcctctggtgattatcatctcgttcactacttggctagcctggtttttggctggaaaatatcatgcttaccccaagtcttggataccgtcttctatggacagttttgagcttgctctgcagtttggaatatcggtcatggtcatagcctgcccttgtgctttgggtttagcgactccaactgctgttatggttgggaccggagttggtgcatctcaaggtgtgctcatcanaggaggccangcattagagagtgcacataaggtggactgcattgtttttgataagacgggtactctcactgttgggaaaactgtga

SEQ ID NO: 1235 - DNA, 355 bp, Glycine max
  unsure (1)..(355): unsure at all n locations
  Clone ID: V4L-02-Q1-B1-G8
atgtttgagccacaacagctatacactcgcgcgaagaccgaggaattcgacctcgagtcaggagaaaccctctacccagggctgagcgtcggcgagaaccagctccgatggggtttcatccgcaaggtctacggcatcctctccgcgcagatcgtcctcaccaccctcgtctccgtcaccaccgttttctatactccaatcaatgacctcctcaagggcaattccaccctcctcctcatcctcctcttccttcncttcatctttttgattcccctgttgaagtaccagcagaagcatcctcataattacatcttgcttgcactcttcaccgtgtcgatcagttccaccatcggag

SEQ ID NO: 1236 - DNA, 411 bp, Glycine max
  unsure (1)..(411): unsure at all n locations
  Clone ID: V4L-02-Q1-B1-G9
ggtggtgaaaggtcccttgttgccaacttatcagctgcaaattgctacaagtctgagcatttgacgagaccggaaaattgggcattagttgaaaaggccaagtattactacatttctggctttttcctcactgtatctcctgattccatacaattggttgctgaacatgcagctgcaaataacaagatcttcatgatgaacctttctgctccctttatatgtgagttctttaagggtgcactggacaaagttctgccatatatggattatgtttttggaaatgaaactgaagcaagaacattttctaaagctcaaggctgggagactgataatgttgaagaaatagctttaaagatttctcaattgccanaagcatcagaaaaacataaaaggattactgttatcacccaa

SEQ ID NO: 1237 - DNA, 373 bp, Glycine max
  Clone ID: V4L-02-Q1-B1-H1
gctacaattttggtagcatggcaatgccatgcgtacgatatgttccctctccgaatgaacactggctatggtgcccgtactccggaggtgaaatgcgcaagttggaggcttgctgtggaagcacacaacatctttggctttgagaccattcctgaagagtgcgttgaagcaacaaaggaatacatccatggcgaacaatatagatcagactccaaaacagttaaccaacaagcttacttttatgccagagacctcgaagtccatcccaaggacacatttgtgttcagtatagatggcaccgtactctctaatattccatactacaaaaaacatggatatggggtggagaaatttaactcgaccttgtatgatg

SEQ ID NO: 1238 - DNA, 351 bp, Glycine max
  unsure (1)..(351): unsure at all n locations
  Clone ID: V4L-02-Q1-B1-H10
gcagatctggcaagggatgtagccaagttggaaattccttcctaccgtcgccatttggatgttgttgtggcatgcgaggatgacgaggataatgacatcgacatccctcagatatccgtttatttccgttagtaggtggctttcttcttcatagaggtgtgtttgagacttaggtgaaaacgacagcagccagcatgtttgactatatttataattgatacacaacggcaacattatgtcaaatttcgtatatgaattgaaaaagcaactttggttgtgttacttttttccatgcttttgggtctttatcctaaccttacctatttattgggaaaaaaaannnnnnnnnnn

SEQ ID NO: 1239 - DNA, 375 bp, Glycine max
  Clone ID: V4L-02-Q1-B1-H11
aaagtttttaatagagggtaagtctcaaaaaatcgaagaattacagacgaatatgcaaaaaaaactgaattgtgtgaatcgaaaactaaacattgctattgtaaaagttgcaaatgcttataaacaccctaatattattgcagaatttatagctggacaattaaagaatagagtttcgtttcgtaaagcaatgaaaaaagctattgaattaactgaacaggcgggtacaaaaggagttcaagtacaaattgcaggacgtatcgacggaaaagaaattgcacgtgttgaatggatcagagaaggtagagttcctctacaaaccattcgagcgaaaatcgattattgttgctatacagttcgaactatttatggggt

SEQ ID NO: 1240 - DNA, 394 bp, Glycine max
  Clone ID: V4L-02-Q1-B1-H12
ggcgattcagatcttagggtttcaatttttttttctgtggagccccattggccatagccgccagccagagaagagtagaagccttcgatcctaggttttctttccccccctttctcccaaatcggacctttttcgcttctcgattcgcttccgtagccgggcgatttgaggacccagaaaagaacgaaccgaacgttttatattttttcggataatcaatcgaagatgtctcgttgcttccctttcccccctcctgggtatagggcacgtggcgacgccttgatcgaatcgattaaggtttgttgagccgtttcgattttgcgttcgtgcgcaactctctctgcatgttgtttcttgcataaatctgccaccccttttgcgattaggttaaaat

SEQ ID NO: 1241 - DNA, 349 bp, Glycine max
  unsure (1)..(349): unsure at all n locations
  Clone ID: V4L-02-Q1-B1-H2
tgtgagtgcggcaattactggaacagcggttgagtgtgcgatcgagaaagcagagaaatggggttggaatcggtgggagatttagcgattcacgtgattctcagtaagttaggagcccaagacactgccagagtcgcgtgtgtgagcaaaaggttctgttcttccgcttccgacgacactctctggatcaatcactgcttccacgaactcgctctgacacaacccctcgatcatctcggaaaccctctctcttccttcaaggaatgctatcaagcatggcgaggagcttttgttatgtatccttggtctcttgttaagcgtgtaaaaaggtgctgggaatanaataaaa

SEQ ID NO: 1242 - DNA, 310 bp, Glycine max
  Clone ID: V4L-02-Q1-B1-H4
gatctcctcggcggcgcgctcttcctccctctcttcaagtggatgcaggactacggccccatctaccgcctcgccgccggcccccgaaacttcgtcgtcgttagcgaccccgccatcgccaagcacgtgctcaggaactacggcaaatacgccaagggtcttgttgccgaggtctccgagttcctgtttgggtccggtttcgccatcgccgaaggtcctctctggacggcaaggcgcaaggctgtggttccatctcttcataaacggtacttgtctgttatagtggatagggtgttctgtagatgtgctg

SEQ ID NO: 1243 - DNA, 238 bp, Glycine max
  Clone ID: V4L-02-Q1-B1-H5
tcgttgtagtgttcattacacccaacaaccaagtgcagcaatcaccaaaaaagaagaaggcaaatcaaagttttgaaccttggttcaatatctagagtccctgcaagctcaacacatcagagataatcaaaatgcatcctgcgcagatcgttttgtatggatcaactttatgtgtcatgataacagtgcacttctccatgaagctactcgctgaacatgttttgaactggaagaaacc

SEQ ID NO: 1244 - DNA, 308 bp, Glycine max
  unsure (1)..(308): unsure at all n locations
  Clone ID: V4L-02-Q1-B1-H6
agtttatctgagcaatcttaaggaacaaaactcatggacacttctcttggtgtctacatcaagaaagagacggaaataaaggagatataagtgagtgatatgatcggtgatgtgatttatataattggtgatgaatatgatagaagaaagagagagaaaaattgagagtgtcaattagctgttttgactgtttaagtgttcataaatcagcatcccaagaaaaaagatctttggacacctctactggagtcgtacacanganagagatgagagatatgattggtaatgtgatgtaattgaagagagat

SEQ ID NO: 1245 - DNA, 293 bp, Glycine max
  Clone ID: V4L-02-Q1-B1-H7
tctacgtcaaatcctaagaaacccatttgaaattttaaatctcgttctggctaattccatgttcattgtttactatacctcactactccaagggtctcataaatttcttctgcttccaactctgctgcagaaaaagaaactgttggttctagatacaagtgggtttccagagtagaagtgaggctattgggcatgagataaacagcaagcaccatcatctacgactcttttgactatattataagcatcagcaaaatggagagtgacttgagctgggagcagaacacgctcat

SEQ ID NO: 1246 - DNA, 306 bp, Glycine max
  unsure (1)..(306): unsure at all n locations
  Clone ID: V4L-02-Q1-B1-H8
cctttcgagatcaaccgccaccgctacgcctccgcgctccgccgccactgcaacccccgcctcccttctccgtcaatgcaaaattcggcgtcgattctcgccggaaccttctcgcgctcttccttcccctccgggctttgacttttgctttcttgcgattgcgatgagtccctttcgccctttgttgctcttcgccgccgtattcttcctcctccgccccctcgccgccaccgacggcgacgccgatccgctttacataggttgtgtggagcactgtaagaaaactggatgtgtangggatagatg

SEQ ID NO: 1247 - DNA, 339 bp, Glycine max
  Clone ID: V4L-02-Q1-B1-H9
ggcatccacacaatgcttcttgcaccaccatgccctcaccactccaaccagagcttcatcacagcgcttagttgtgagcaccaaaccaaaccagattgtttgcaaggcacaaaagcaggttgtccaagagggtgaggacactactaacattgtctctcgcaggttggccctcactgttctcattggtgctgctgctgttggctctaaggttgcacctgctgatgctgcctatggagaagctgccaatgtgtttgggaagccaaagacaatcacggacttccttcaaaacaatggggatggattcaaatccccagttccctcaaagtggaacccaaccaa

SEQ ID NO: 1248 - DNA, 264 bp, Glycine max
  Clone ID: V4L-02-Q1-E1-A1
tgtccaatggattgccatcataatccaatgatgtagaatcgaaataacagaagacttcaataaattgatagtacctttttgtacaaatgaattattctaatactcacaacaaagttgggtatttagcatctagaaaatctcttagagtccgagctgctttatgaccacccattaattccgctagcttctctacaggacgaagtgcaagttctgccaagctcttacacccaacccatccattatggccctgtagtttgagtctgt

SEQ ID NO: 1249 - DNA, 258 bp, Glycine max
  Clone ID: V4L-02-Q1-E1-A2
tttaaaatgaaacaagaatttattttgaaattgatgaaaagtcacatgcatgttttggtatgaatgtcgtctacttgtgatattgaaggtatttacacgtacaattgcaatgttaaaaaaaagaaatggaattggaaacagtttgcgtaggttcatctaagttctcccccattgcagtaatgggccccaattggggcgtacattaaggtactttacattcaggcgctttaggccccatatccgaattgtccggtcatc

SEQ ID NO: 1250 - DNA, 376 bp, Glycine max
  Clone ID: V4L-02-Q1-E1-A3
gtatcttcaatttcatccttaatttatttatttaattttccaagtttgggttatgtataattatataacaatagttcatgtcacagccataaattcatatcaggcattcaaaagttcactacttcttcctctttacagactaataggttgtaataaaatggggtgagtcagaaacttgattatgatcctcttcaaagatcaattgaatacatggcatggatttgtcttggaagcctcctcttgttatttaccaagagtttatgttttctcgtccttttgaatgtaaacaaaaagcgtgtcctgtgtactgcttctgcctttgcctcctaaaagaattttccaaagtctccaaggatatcaacattttccccacaaa

SEQ ID NO: 1251 - DNA, 315 bp, Glycine max
  Clone ID: V4L-02-Q1-E1-A4
ggaacaagggcgcataatttattaaagccacgaaagagaaaacaacatagtgaagtctcttacatgacttgttgacacacagctgaaacaacataaagtgaagctagtgcccctatttgaacgcatcttattacatatagatagataggagcaagctagattgttgagaggtgaaggaactactgaatgtagtacaggggattaggaagcttaaaggtcctgctttcgcctctgtggcctccgaggagatcgctccattggtctccaatgattccaacaatgttgtaaccctggcttaacagtttcccccccgct

SEQ ID NO: 1252 - DNA, 238 bp, Glycine max
  Clone ID: V4L-02-Q1-E1-A5
cagagaagagccatgagactttcactgataatgacataccttcctttcatccatcccaacacacacgcccactagtctttgttttccaacttgaatattggaagaaaaaaaacccaagaaaaaataaaaattaaattaaaagaaaataatcaagaagaaaacaaataataataagaaataataaaaactaactgaaagaatctagtttaagcagacacaactgtttttttcctccaac

SEQ ID NO: 1253 - DNA, 278 bp, Glycine max
  Clone ID: V4L-02-Q1-E1-A6
tttagattgccagagcagtttattgctgagaactgtataacagaatacaagttgacataagacggagttcttaaaccaaagacattcacaaacagtacttactctcctattcctaaggcttaataatgcttctccacaccctgataagccagttgggaagctagctccaagttcttccaactgatttgctccatttaagtcctcttggaactaacgtattcttctggcaagtaaatctctccgccagcttcaccatgttgctccccgctgatagtttt

SEQ ID NO: 1254 - DNA, 320 bp, Glycine max
  Clone ID: V4L-02-Q1-E1-A7
ttttttttttttttttttttttttttttttttttttttttttttttttttttttttttttttttttttttttttgttttttttttttttttttttggagggcaaaggccttttaaaaaaaagccggggaaaaatttaaccccaaaaggaagttccttttggaaacaaacccaagggccgggggggaataaaaaaaacaggaaagaaaaaaaaaaaaccaaagattaaaaaatttaaaattccgagggacaaaaaaaacccaaaaggggacccctggagggcctaagttgggcccaccccaaaactttgctgggaaccccc

SEQ ID NO: 1255 - DNA, 371 bp, Glycine max
  Clone ID: V4L-02-Q1-E1-A8
agagaaagagaatacattaacattaatatccaggtacagtttataaacattcaaggggctgatatctgacactttcaagccttgattataatgattagagatcacttcaatcactcataaccaaattaatttacaaggtataatgctgcatgagacaatcagtttcagacactttaccacgaagatgagcttataattccaacaggtcttgctcattttccaaatcccatacaacaattcttccatccaatcctgatgtgctgaaacgccttagcaatgtgccatgattcccaagaagcattattcaactacaagccaaaaaatcaaccagccattaacagtttatatgaactttaagtttgcctgaatcc

SEQ ID NO: 1256 - DNA, 251 bp, Glycine max
  Clone ID: V4L-02-Q1-E1-B1
caaggtaagaattttattgcacaatgagaaggcaaagaaaattgatggttctgtttctcagtacaagttttagaatgaaaaatgaaccaacaagtgtttgtagtggtagtagtagtagtagtaagcatacaaaactacaatggcatggtacatacatataataattgaattaccaattcaaaatttgatggctctcacttccacttgttggcaacaatgtcaaccaaaccaaaaacctttgggagtacccc

SEQ ID NO: 1257 - DNA, 264 bp, Glycine max
  Clone ID: V4L-02-Q1-E1-B2
ataaataacactgtaatgaaccaccatggtttcacacttttccactatatattcagttccttctgaacacaacacaagctacaacatataggattccatttgaacccaatctgtagtttttgtacaagaacccatatgcaaaaatagttcattcttattctattctcttagtatatatgtgtataatacttataatggaccatcctctatacaaaagtaccagtaatacattatatataggttgttgaatatccaagcgcccct

SEQ ID NO: 1258 - DNA, 291 bp, Glycine max
  Clone ID: V4L-02-Q1-E1-B3
gcacaaaactggtaaaattccagatcaataaggattgcggcgaagccgcaaagatacaacattcattagggaaaacaggagtggggaaaaataaggggggaggggttgaggaagaatcaattgctcacagagcatgctaagacacctaaatattccacacacagttattgaaacaacccaatatagagaaaatttttctttggtgtattataatataaagcagaaccaaatgacttggaagattctactttcttataccattcacttggcaagttcgttgcggatgaattt

SEQ ID NO: 1259 - DNA, 358 bp, Glycine max
  Clone ID: V4L-02-Q1-E1-B5
gaacacaaattataaagaaaaagcaaaccaagccaaaaattgaacactacaaatagaaagttgacatttaataaaccaaagcaacacaacgcagcaaagtcctgaaactcgctgcgcttaacaaaaatgtaatcaggggttccgacaaacacaacacattaaaacacagataaataaaagcaattttgccaccgtcgatcaagaacccagttctgggaacaacagttgcgagatgatggtggagacttcaaactttgtccgaaaaacaagctacctagaaaagaagacacaagagtacagaaaagaaaccaacatttaatgtaaccaacatcccctgatgaaccagcccgcacgattc

SEQ ID NO: 1260 - DNA, 393 bp, Glycine max
  Clone ID: V4L-02-Q1-E1-B6
ccttaaccttcctttcttctgtcttttccttggccttttctttttcatctttcttttccttaaccttttctttaccttcaactgttgcttccaaattcctttcaaaatactttcccaatagtttgggtattccatcaactctaggatgaaaatttccaacatgattctgaactggtgctgcatttccaattggccggacctcatcctgtattcctcgcccatcaatcttcttaacatcaaagaaccatatcccttgagtttttcattaccatcagacctggtgccaccacctttagccaccaacctaacagtcccctcatcctttctatgggttgtatttgtaaatttatgaaccaattgatgggtaactcctccatcaacatccttaatcct

SEQ ID NO: 1261 - DNA, 197 bp, Glycine max
  Clone ID: V4L-02-Q1-E1-B7
cattagttctcatccattaatttccattgaagtccgaaaacagaaaccaaaaatacaggatgatgaaatctcaaaaagcaaaaacaaatgggaatgtagtttaagtacaaacaaacaaagtggggtggcggctacaaatgctttgcaaatttttcacacttagaagcctgggggcttgtaggcgatgaagctgatgc

SEQ ID NO: 1262 - DNA, 324 bp, Glycine max
  unsure (1)..(324): unsure at all n locations
  Clone ID: V4L-02-Q1-E1-B8
tgaaaactaagctccatggaatagagtttcttataacactacaagctctaaaaaccattagacaatgaagttattaatagtcattcctccctgtagaagtaggggcatcacaactactgattaatcttcattacaaaatgaagagaaggaaataaagttgtgtcaataaggaacaggtatacgaacagtggagggacctgatttcatgtccntcaacattagatttaagagagcctgcgttataggcctttcttgccatcaccaataacctgctcatcccattgcactacaaggcaaacaagaactccgctggcaagaagcatc

SEQ ID NO: 1263 - DNA, 272 bp, Glycine max
  Clone ID: V4L-02-Q1-E1-C1
ccagaattaacatcagccttcatgacagcagtaaatacctcaaaatgtctcagtacaataaatctaatgtattcaacataaaattcaggaaataacgtcatgtagtctatcaataccataagaatccatatgcctcataataaggcaaagattacaacaaccttcttgaatggaaacgcaagcaatatgctcatctctttctaccaccacgctctcttaacgtgagggtaagtgtttcacctccaccaacattgtaatgggcaagtgacata

SEQ ID NO: 1264 - DNA, 249 bp, Glycine max
  Clone ID: V4L-02-Q1-E1-C2
tgagaagaatgaatacaagaatttgaaatactaattacaggaaatatttgcaatcataaaaattgaagccttcaactactactaatatctatcaaagtctagagtagaagttaaaacgacaaagaactacaaaatcaaatatatataaaaaaaaaagaggctaaaactactcaaaactgcaaatgcactcagaattgtgttgattgagcacctaatcctagccatgtcatggattcagccggcttattt

SEQ ID NO: 1265 - DNA, 240 bp, Glycine max
  Clone ID: V4L-02-Q1-E1-C3
aaatagtaaaactttctttgttaatatttaacacttgcatatggccagacgcataactagccaggcatataacactggtgaaaatactaatgattatataaataaatagacactactacattcactggcttctactacataatgcacactttaataattacttaaaatgaacaaacccttacaaaacatttatttctgaaaaccaggaaaaaaaaaaaaaaaggtgacttaaaatgaaaa

SEQ ID NO: 1266 - DNA, 261 bp, Glycine max
  Clone ID: V4L-02-Q1-E1-C4
agtcaactaaaagtatgtgtatggttattttcataaatgaatttaatagtttgaatacaaagtttgtggacaaaagttttacatcgaataacgtgttgccacatttaataaattcgacatctcatgagccatcaagaagctcgttggttgatgtggtatgctttctctttacataagaatcaactaacctatgctaccaaagagacaaaacatttcccatcatgtgtataacctatcatactactgcttatgtacaataat

SEQ ID NO: 1267 - DNA, 218 bp, Glycine max
  Clone ID: V4L-02-Q1-E1-C5
accacaatgtccaatcttatttcaagtagttgtcaatttacggcaatatatataactaacaaatatgtgtgggaaatgtcaagacaggaaaaaaaatactacccctacaaagaaccctttatgcataaatgtaatgaaattcaccaataatctttacatgagcaagttccatctttgaaatggtggaagcgattacggtctctcacagtaatttcccg

SEQ ID NO: 1268 - DNA, 291 bp, Glycine max
  Clone ID: V4L-02-Q1-E1-C6
aacaataaaacaaacaatttaacaaacatttattataacaatatcatagtatccctcaaagatgaaagggatctattaagttccaaggcaaataactacaacacactaattaagaaacaacaaatgacaaatagagtatccccggagaaacaaaccctagcagtagcacacacataatttagatttattcatcgtctacctcaggataaacacgctttatccttacgtccttaattgtaacaggcttgtctccatatatggaagccagtgtgacagaaatactatcatcgt

SEQ ID NO: 1269 - DNA, 271 bp, Glycine max
  Clone ID: V4L-02-Q1-E1-C7
acacaccaaattaagctaaatgagaaattaccatgttatattacataaattaaagaaacagatcaagaataaagtaactaagcttctagcttatacggggagacatcttattaactaataaagttttgatgtaatccttcattaaccctcctgcatttgtaaaattatcttcatctttgtgaagcacgtcaatcatgcgcacaaggttgacaacacgcaaaagaaaattcattggcacttcagtaggattaacgcatgcctcattgatgtc

SEQ ID NO: 1270 - DNA, 397 bp, Glycine max
  Clone ID: V4L-02-Q1-E1-C8
ttaggacataaagaatattaaaataacatgatttcagtttctcaatcttcaacagtgtcatcaatacatgtcttagcagcaacaaaaatataaatgtacatatcatacctcttaacaagagcccaggcacacacagagcacaagtgagtgtttgaaatagtgtccaacatctaacatttttttcctcacaaaaaacccaagataatacatagaagcatgtatgcattgctttcaagtccactgttttttacggggaatcaagcataccttaggtcaattttggcgacctaggttctcttggctcctttattgggaaacttgagacaaacaaagcataagattatttagtgaaatgggctaagaatcatatgtgcaaaagtcatcaaatcccatatac

SEQ ID NO: 1271 - DNA, 181 bp, Glycine max
  Clone ID: V4L-02-Q1-E1-D1
cttattatattattttttcttttatgcggaaatgttttttatatttcatatatatctttgttattaatataatgtgataaaaaagaaaggggtccccaagcaaaaaaaaaagaaaatctccccaaggagaaaacccctgcaaaggacaaaagcacccccacaaaaaaaacaagaagcaaaa

SEQ ID NO: 1272 - DNA, 378 bp, Glycine max
  Clone ID: V4L-02-Q1-E1-D2
tttttacagaacagctacaatactcaagctgcttaatgaattttattgattaaatgcaccaaacgaaaaatgttctttttttgttttgtttcctttcagagacaaagggggactactctgcaaatctgaactagagaatctcaatagacttcaacatgccattgtttgttcttcttaagttgagaaagcttctcttcccaactttctcctctttgctcagcaaccttcttcagcgtatcttggatccctggcatcatcccttttcagacacagaaataaaagttgggcccaataaccaagaatttgaaaaattcaacaatggtctcctcaatcctaacctgaaaaaacattttgcccccaatcctggtcctttggtcc

SEQ ID NO: 1273 - DNA, 293 bp, Glycine max
  unsure (1)..(293): unsure at all n locations
  Clone ID: V4L-02-Q1-E1-D3
aaaagtagttatcataacgctgcacctttcttttgttgaattatgccatacataaattgcaggagcataaagaataaatataactgcgtactgtaaacttaatgttcttttacaactcgatgaatagcagctaataaacatgtaccttaatcactaactttctactttcaatgttgtagtctatagcctatttttggttccaaacatcnctccttgataagagaatttctaaccatatctttcatattcagccaaaagataatttccaaaaataatgtccagttaagaataaa

SEQ ID NO: 1274 - DNA, 237 bp, Glycine max
  Clone ID: V4L-02-Q1-E1-D4
ggatataattacttttctcatctggctataattacaaaaagatgaatatgacgatgcacgaagaattggatgaaattttaagcattcgtggatactcgactgtctgcagaaaagcaaaaatacacaactacaatttttcttaagattatggcacacaaagggtctttggttacttcacatcatctaaattagatgggcgatgtagttgtgcagtgtcatttgaagcgctgaatccgt

SEQ ID NO: 1275 - DNA, 221 bp, Glycine max
  Clone ID: V4L-02-Q1-E1-D5
gaatcttcatacaatttagcattgcttatataattaactaagattaatttgtcatctctctcggtgttgcgggctatataaagatcaaggttgaataatgaaaattttgttacaagaggatttccaaactcttatcaaaagaagattttccgacatgcataaacgcagttcatagtttcatatatatatatttttagaaatatcatatggtgatgaaggtg

SEQ ID NO: 1276 - DNA, 174 bp, Glycine max
  Clone ID: V4L-02-Q1-E1-D6
caaatgatgatattttaatggatctatactgccgcgtaagggtttcttttcccgtttgatttgtgagaacttgctaactacacttagtcaaaggactagctgcaagagtcatcatctaatcttcaacactttccaaaatgacaacaacagtcacagaccagagtatcaacatga

SEQ ID NO: 1277 - DNA, 304 bp, Glycine max
  Clone ID: V4L-02-Q1-E1-D7
ggctaatgatcctccacattatataaaagtgaacacatgatgataaatacttggaagaaaaaagaaattaaaaacaaaagggatacaaatacacccttgacataaaagcattcttatctacaaattcaagagcccacggtatttggcttttcccccaaacccacgggtaagcagaaaagccaaaagagagggacctgtagacagacttgaactgaaacactgttcttgttttgggtgacacaggagacaatcatcataaattaggtagtgggaaaaactgaatttttttttttttaaataaacc

SEQ ID NO: 1278 - DNA, 343 bp, Glycine max
  Clone ID: V4L-02-Q1-E1-D8
gcacaaaataatttctttacctccaaacatttttttatagttcatacagtacaaggaattgtctgcgtctctgaacctttctttgaggttcatcatacattacaaaaagaaaactgaagtaaaatagttcatagtctaggtataaacagtatataataaattacacgaaccaaaaagaatcctttagaaaatatagtgaaaaagaatcgtaggaaatgtcgtcgtgatgggaacaagcgccccccctcaaatttgagggcaacaatgaaagggtgcacaaataaaggcctttcaaaatcctccaaccaaaactccaagttttaataataacctcgtcaacccc

SEQ ID NO: 1279 - DNA, 297 bp, Glycine max
  unsure (1)..(297): unsure at all n locations
  Clone ID: V4L-02-Q1-E1-E1
gtgagatatggagctgtgtatttagcaaatataaaaaaaggaatgtataaatgttaaaatttcggccacccctaaaaatagagtcttcggatagttaaatcttatttaactatacttttcatttacaaattcacttttggtgaccgttaatgttttcatttggcagaattcatggtcttgactcatggctcgtggctattgacacgacagtgaagttctaacattttttgatggaatgggatcactgagagagcagcacgacagtctcttagtgcanctaaaacatcccccttgtgt

SEQ ID NO: 1280 - DNA, 370 bp, Glycine max
  Clone ID: V4L-02-Q1-E1-E2
accagtagcaaattcttattcccagcacaagcattgtcatgtctctagccagttaaaaataataaggcaaaaacacatacactaccaagactcaacaatctgtcctcggcgagaaaatcacagaaaaacatccatataactggtaacgcataccatcatcagtacctcctggggtagcggtccataaaccgacccgaagggcactcatatgccaggtgaccacgacctccacaattgtgacaaatcatcaaggggcccatgcaatccctaatcaagtgacctaattgccggcaattcctggaaacaacatctccgtaaccaacggcggcgctggcaacaagaacaacggcggcggcaacaacggcaacaa

SEQ ID NO: 1281 - DNA, 174 bp, Glycine max
  Clone ID: V4L-02-Q1-E1-E3
tttttgctagcaataagtttggtaggtgatatattgatattaataagccactctcattaaaggcaaacaaggcccaaggagtgatacaccaaaatacataaaaacataatatcatagaatgccaccaaaagggactagtagcatttggtagctagtgcattaaatcggctcgag

SEQ ID NO: 1282 - DNA, 323 bp, Glycine max
  Clone ID: V4L-02-Q1-E1-E4
gaagaaaaatcagtgaagttacctccacctataataactccataagataggaataaaagcaccctagaagttgtcctcaaggtagccatttacataaaactactagcaaataaatgccaaggtatctatatacagcgctaggatttcaaacagaaaggtagatggcataggaataagaaacttttggaacatatcttatctcagcagagacatatggctaaaagaaagatttgagaaagcaaatggggtgtgaaatccaaaaagaataattccttccttccaaaggcaacaaagcaattttaagttgttagacctgtacgcct

SEQ ID NO: 1283 - DNA, 268 bp, Glycine max
  Clone ID: V4L-02-Q1-E1-E5
aaaactgtgaaggcattagatgaaactgtcaaacaattacaagctgttcagtttttcatgtttaaagaatacaagatttgatttagatacatatatactatatgagtatcacaaaaatttaaagagacacactctcaagtaccactttatcaattcttaatgctaatcttgagtcgatcattggccccaggcagctatattcagtggccaagctccacttctccaagcttttttttcttcaaaattaccctgatcttcaagttgatac

SEQ ID NO: 1284 - DNA, 240 bp, Glycine max
  unsure (1)..(240): unsure at all n locations
  Clone ID: V4L-02-Q1-E1-E6
ccaaggaacaaagcaaaatgccttaataatatctcagtgatatgtattgtacattaagattggagaaaaacatgaagatgaatgatttagagagttggagctctctcagcagacccggcaatgacagtgagcaagttgttgccaaaagggtcactgagatgttttgctaggttctcaacaggaccttctccggtgacatatgcttggaagtagaaaccaagcatggcanacatagcaagt

SEQ ID NO: 1285 - DNA, 237 bp, Glycine max
  Clone ID: V4L-02-Q1-E1-E7
cagaaacacaaagaaaaatatatatccatggtaatatccattgttttaaaatacagggtggaacaatctatgatccataagcatgtatactcctaaacaataaaattataaaaagaaaaaagaagctggagctaacaaaccctcaaaccaaaattttcaagaaaatgatattattaagtttgtataagaacaatggtacagcccctgattaacaatttcaaaagctgttgaaggctg

SEQ ID NO: 1286 - DNA, 353 bp, Glycine max
  Clone ID: V4L-02-Q1-E1-E8
gtgcaaggagaaaacaatattttttcattaatcagaggagagaaaagatgactaggcatatcaagccccaactaatttattttcaccgtccacaaaaatcccaatcagattcgaatcaactgcattttatatacagttttgctttcacatggctatacaaaagagaatgctaatgctttagatggatgtatacggggtgcatcgtactgctggcaaaaatgattcttgaaatcaatgcaaccaacaagggttcaagggaaaatttaatccccaaaatttgggtaacaattccaacttaatgataacctccccaattcctggttaaatcaaggatacaacaatgggtccaaaac

SEQ ID NO: 1287 - DNA, 306 bp, Glycine max
  Clone ID: V4L-02-Q1-E1-F1
ttgcatgaaagtaaaacatcaactatccacagatcaattacatttgtagatgtctatctaaaaattatagagctgatgcaaaagtataatttaagtaccaccaatcattgactcaatcgcatctaaacaccacaaacatgctacctaaatagaacaaagaaatgctttcacaacatctaatttaaagcacttttactaagtcactaaaccaaattttgataaatcagtggccaaagaattcaatttctggacatacaaattggggaatatttaaggcccaacccaaaaaattaaaaggaatatttt

SEQ ID NO: 1288 - DNA, 330 bp, Glycine max
  Clone ID: V4L-02-Q1-E1-F2
ttcacagattaacaatgagaagtattcttaattctgtataaagaaaattatacaagatttatcttttgaaagaaatatacccaaatcattatccagtcatggattaccattaccaggaaatctcattttcaacgcttcattcacatgcataacccaaagataattatcaacaagctgaaaaccatagtattttggatctggttacttatagagtaaaacaacagggagtactagcatattaaaggctggcaataataaagtaattccaccacacattttcaaaccaaattcagcctgggcaattaaaaaccctaacaaccaaacacacac

SEQ ID NO: 1289 - DNA, 288 bp, Glycine max
  Clone ID: V4L-02-Q1-E1-F3
taatttcaatgagaagaatttcatttagatcactgcatctaaaactaatcttgctaggaagacatttatttaacatacaacatgaaactattaccaaatctattccgtatctaatagaaaccggatgtcataaataacgagataatcgacacggttgaacaaggaaccctaatgacaatgattcaaaatttatcccttttttttttacttctcaaacattcgtggatgagttcatttcattcagtatgcggcagtatctagtatggtcaaaggtgtttttgaagctag

SEQ ID NO: 1290 - DNA, 197 bp, Glycine max
  Clone ID: V4L-02-Q1-E1-F4
aaaaaaaccccccaaaaaaaaaaaatttaaaaaaggaattcgggggcaaaaaaaggtttaaaagttgcaaacctctgaaacgggggaaaaaaaaaagggggggcctaaggggggaaaaatcttaaaaaaaaaaagccaaaaaaaagggggaaaaaaaaccccaaaattttttaggggccccaaaaaaaaaggggggg

SEQ ID NO: 1291 - DNA, 290 bp, Glycine max
  Clone ID: V4L-02-Q1-E1-F5
tttagtaactcttcaacttcaacatacacaacattttttttatgaagttcaacgtacacaacattgtaaaaggtgttttcgtccttcgtcgttttcctggctaaactgttagccaattatcaggttgcagaaccagaactttaattgagttttatgtacaatcaaattgcattacggataaattgggttcggggacaggaggaagtgtaaaattccaaccccccccccccccccaaaaaaaaaaaaaaaaccatgttcagtgaaatcctagtaacaacataacttgacga

SEQ ID NO: 1292 - DNA, 266 bp, Glycine max
  unsure (1)..(266): unsure at all n locations
  Clone ID: V4L-02-Q1-E1-F6
tttgggcaattccaagatacgaactttataagcaaaattttaaaatgtttatacatggtgcaaacttcaatattcttgaactcgtcgacaatatgctaactaaaagtcaggcgattattgatataagtctcgccaaagggtaacagttacaatttccaagttacataaaccacttgctaaacatacccaacaagaacttgaaggtaaaagacgtccgaaaggcgcattgtaatccanatanattttaaaaaaagaaattgtaactc

SEQ ID NO: 1293 - DNA, 396 bp, Glycine max
  Clone ID: V4L-02-Q1-E1-F7
tttgtattgaattcaaaataagtactattataacaaatacaatctcagtgaagttttattattaaatagaatacatggcacactgacagaccttacattacaggtagcaacctgtattcacaaactgctaaacgtttcatcagatgtaatatttacagaaggaggaagaatggtaaaagaacatcaccaacaacctaatcaaagtacaattttcctttccaaattgatatctcccctccaccagattgtcaaacgatttggttattctctcaacacaatttcaacggatgacagaattactcaattcgtcaacaacctaaagtagaatggagttataatgtaacatgctgataaaacttgttaactacggagaccatgacaatgaaaacgattact

SEQ ID NO: 1294 - DNA, 281 bp, Glycine max
  Clone ID: V4L-02-Q1-E1-F8
aaaaagacattctaattttatacatataaatattcaaaaggtagattctaacacattatacatgtaactttatcctatcattttctgcatagcgataattttagagttggctgatttacccgtcacaaaaattccgggagtggccaaaattaaagactgaaactgaaccgctttgttgcgcagatgcaactaataaaggcgcgtttgtttaaccctttgagcaaaacaattggaacaactgaaaaacaaacacacaataagcaataaccaattttccaacg

SEQ ID NO: 1295 - DNA, 367 bp, Glycine max
  Clone ID: V4L-02-Q1-E1-G1
aagaaaataaactccaattaattgatgccacgaaaaaggaatattttttctttctgatatacacctttgcagatggaagttaaaatatacctcttaaaaacaaaacaaaaatgtgccctagattagagcatgcaactgattccagggtacactcccataacaggcaaacaccccagtacttccatcttcgagtcgagtcgagtctgttctgtgctaaaactgcctctcatgtattgccactggctttgatcattttttcttcggtctttgcaacctttccggttttttcccctaaaagcattcctttcccctccctggctttttgaaacccctccctaaaatggaataaccttttaatcctcctttt

SEQ ID NO: 1296 - DNA, 228 bp, Glycine max
  Clone ID: V4L-02-Q1-E1-G2
agtacgaaacgaagaaacttttattcaattgaataatgaactttacagcgtgattgctcatagcgggccttctctcccgctataatttacaagccactgcccaaaaataaatatcatgaaacacaaaagcctatcttagacgaggaagcatagcttgataaactctccagcggtggtaatgagctttgcagtcaccattaggatttggggtacaagaaattttttggg

SEQ ID NO: 1297 - DNA, 337 bp, Glycine max
  Clone ID: V4L-02-Q1-E1-G3
aaagaagctgcaaaatagtttttattcctttaatgcattacttgattgattgaacactccaattgttgcatgatcaaacagtgatttcaattgggtactcttggtccccaacaagcaacaaataagatccttcttcaatcaccatcgaaccagcctcattcgccacgctaagatgctcacaagggcttagctcaaaccccacttgaaccgttttccctgcaatcaactttaaaatttggaaccccaccaactggttcaacggattcccaatggttccaaactttccctggctcaaaaacagcaacacgggaagcctccccgccaagttaacgtgaat

SEQ ID NO: 1298 - DNA, 360 bp, Glycine max
  Clone ID: V4L-02-Q1-E1-G4
gcttcaagcctctctttcataccaactagttgccagagtatctatgagtttgaattcaaagtttaattacagcacagcgataccaacgtagcaagatcgatccgattcattacaaattgttacacggagttatacaggtagctattgaaacaaatatatattttttttcaaggcaaaatcgattgtggaataatgacgtttccaatgttggtgtggcatggggcaaccaagtgaacaaccaagttccccaaagggccaatggcgggaaaagctgaatggtgaacacagaatcccaaaaaagccaacaaagcaagacgtccaattttaaattccttgaccttggaatcctggaatgtttta

SEQ ID NO: 1299 - DNA, 289 bp, Glycine max
  unsure (1)..(289): unsure at all n locations
  Clone ID: V4L-02-Q1-E1-G5
tcgcgatctagaactcctaatcagaaaaaaaaaaccctagtaatgccgccgatggggaggaagcgaaaggtagcacccaaatcttctctatccaccgagccacctctcaagcagcaacaaccaaaacccgaaaatccccctcaagaatacgaagaagtcgaagaggaagttgaggaagaagaggtagaggaagaggtcgaagaggaagaagaagaagaagaggaggacgaggaagaagaggangaggaagaagaagaagaagaagaaaacgacgtcgtcaaacaacagc

SEQ ID NO: 1300 - DNA, 225 bp, Glycine max
  Clone ID: V4L-02-Q1-E1-G6
aacaaatatcatcctctaataaactgttctaactgaaatccagttcacagcggcagcaatttccatttgaaaacaaataaaccaagcataaaataactgacatcttacaatgttagctaaatggtaggaagagctactgctgttgcttaaggagatgtcaataatcgcttgatgccacttttctgttcggatgtaagcctggagggaaacttgatattgaacttg

SEQ ID NO: 1301 - DNA, 316 bp, Glycine max
  Clone ID: V4L-02-Q1-E1-G7
aaaggaaagaaaagaacccttttcagttttcacacctttgtacactaaactaaaatcatcacaagacgacacttataaacatgattacatacaaaattggcttaaagcaaaaccatcaatcgtgatgcgtcatatatcactggatgactcaacccttatgccacgtatctcaaggttgtctagcttcctgggtctcctgtaatatttcaacaacagagaacagcaaacaacgctgacagaggaggcagccataacagccccagcaatccagggtggcaatctgaaccttgtagaagggaaaagactccaacagcaa

SEQ ID NO: 1302 - DNA, 176 bp, Glycine max
  Clone ID: V4L-02-Q1-E1-G8
cccaagggaaattcttaaaccacgcatacatacaattgtaaagctttaaatttcatgtcaccaaaagtaccaaaacctgtaagggagtacaaaaaaaccacggtgttattaggtttcacaatacttccaacggtatactataaacaagcaccatagtcacaaaaaataaaaataaa

SEQ ID NO: 1303 - DNA, 345 bp, Glycine max
  Clone ID: V4L-02-Q1-E1-H1
ggaacaagggcgcataatttattaaagccacgaaagagaaaacaacatagtgaagtctcttacatgacttgttgacacacagctgaaacaacataaagtgaagctagtgcccctatttgaacgcatcttattacatatagatagataggagcaagctagattgttgagaggtgaaggaactactgaatgtagtacaggggattaggaagcttaaaggtcctgctttcgcctctgtggcctccgaggagatcgctccattggtctccaatgattccaacaatgttgtatccctgccttatcagtttctctctcgctgctgttttgtatgaaactgcatttggagtg

SEQ ID NO: 1304 - DNA, 279 bp, Glycine max
  Clone ID: V4L-02-Q1-E1-H2
ttttatcattgaattgctgcatgcatatagatttgtacaatgaatgaaggataggaagttaatacacaagtcaagaacgcaagtaatcgaattattactacaccacactagatacagatagatagatattgatatataatagatagggaaattgtgcaggtccaacttaaaaaactcaacgacctagcaactctcacgaaaatgacataatgcacccaaacaatatactgagagctgcatttgccattagagatgcttcaatcccatctagcatcaaaa

SEQ ID NO: 1305 - DNA, 356 bp, Glycine max
  Clone ID: V4L-02-Q1-E1-H3
ccagtaatagtatttaatattataagcagagattcataattcagattagccgaactttatacagaagcgaccaattaccaagcattaaaaaaaaaaaaaaaagaagcaaccatgagcttaacacacccatcacaagtccaaaacacttgaacttgctgaaaggcaagacatgaccactttattctaaggatgtttgtttaacacaatacaccagagtgcacgaaaaccatcacagacataatacataagtttttagctacacattaatagtttaacattattcctaattaagggctatctctgcttgaagcttgctctcccaacacctcacttgcaagtgcaggggttgcaggagc

SEQ ID NO: 1306 - DNA, 373 bp, Glycine max
  Clone ID: V4L-02-Q1-E1-H4
tttttatgttaatgttaccatgctaactaattttcataacaagcataaactatcacaggtctagacctgtcatacacaaaagatgatacaaatattttccatctcaaatatatgttcttactataaatcattatactgagaaacattgcaacctacgggaggatgtggatagagacggagtgactcaataatgcagcgtgtcaagaacttaagaattttaatatcctcataggtaagttcccttccctggtaaactctgtccaactcctcctgtgcctttgccaatgaagaaaaatccttgcctaaaagataaagtgtccaagtcagcactgaaccggtggtctcaagaccaacaactaataatgacaaaaga

SEQ ID NO: 1307 - DNA, 131 bp, Glycine max
  Clone ID: V4L-02-Q1-E1-H5
ggggaaaaaacccccaaaaaaaaaaaaaagggccccaacgtaccgggttcaaaccaaaaagacccccccaaaaatttgttaaaaaattgcccccgggaaaaaaagggggagagaacccacccccaaagggg

SEQ ID NO: 1308 - DNA, 246 bp, Glycine max
  Clone ID: V4L-02-Q1-E1-H6
accaaaccacatatattctataattcatccttttgaggaagcttgtataaaaccaaagatagtgtatgcagttcctatactcctggctgaaaagagataacttataaggcaaaaactaaaaataaataaataaataataaccatagcaatggatacaaaattaagccacaagccacatgaagtaggttgtccaaaaagtgactgcaactgaggccaaaacatatgtccatagcatgataacaggac

SEQ ID NO: 1309 - DNA, 337 bp, Glycine max
  Clone ID: V4L-02-Q1-E1-H7
gccaaaattgtaattctgatattgactacaagccacaaggaccttcataagtgctgcagttgctcattctttattctacaattttactgctgtctgaagttgtcccattttaggaagactatgtgcttatagtattccatttatagtgaaatgcaatcaggagaaaagtcctggggtattgaaagggaaatttgggtcaatttccactggatcaagtgagaaattgaaatcaggaattggagaattggttgctgatgtgttggtggaaatgatttcattgatatcggattccgaatgtggcttgctgtagatcccatcaaacacattcatctggaaa

SEQ ID NO: 1310 - DNA, 194 bp, Glycine max
  Clone ID: V4L-02-Q1-E1-H8
gaaaaggtgtaaaaagcattgcaattaattccacaaaaaaagtaggcttcaaacatgaggaaaacaaaaagttacaaaatcaaaagcacagaaaccaccgggtaaagcatttcaaataaacgcctacacgaggaaaacaatttttaaaaaaaaaagttctgatgtacaaaaacaaagtaagcagcaacatatag

SEQ ID NO: 1311 - DNA, 383 bp, Glycine max
  Clone ID: V4L-01-Q1-E1-A9
cgcgtggaacaagttttggtaaattcctagtacatctcatatacctaagtttatcacacttaaagtttcaagcccaaacagtttttgggcttagcctctacccacaaattatctgacccaattcacccaaacgatacatggctcacaagttacaattcctaaactggtacattcaatgacacaatgaactttcctttctctatttttcctccctcaaagcagagatttgagagagaaaaaatcatagaaatcccgtggtttcaaataatttgtaacaatattgcttaaacaatcaatatataacacaaaatctagtgcagaatgtatgccaggaccctaacaggaagaagataataattagctaggtccttgaagttgcatcc

SEQ ID NO: 1312 - DNA, 383 bp, Glycine max
  Clone ID: V4L-01-Q1-E1-A11
tttttcaatttaagtggacactgtaactcaaaattatagaggaagacggtccaatatgaaaaatatagtaagatcatctcaaacttagcatcttctctttgcacctaagacattgagaatgctaagaatgttacacgcaagttccatcacaacttctagcacttggattagtacaacaaccttcacgaacagaaatatttacttgccaagtttgctttgcctccaattcaagactggaagaaagttcccctctgaatagcatcctcgttagcatttccaagagcagcctcgttcaagtacttgtcagccaattggactctcttgacattctcttgttcttggacaagcatgtttacatacagcaagagcttctccagagtcat

SEQ ID NO: 1313 - DNA, 351 bp, Glycine max
  Clone ID: V4L-01-Q1-E1-B9
gaaactcaatcaacaacttgtttgattttatctgttggattctttattgatatatggtactgtctttttgaggtcaagttaagcagcagtacaaggcaacataacttttttacgatattcactcaaagcccacattggaaaataatttctatagagcgggtagtgtaatgcgcctgtcttcaagaataatcctgtgacttcctgttgaggccaatcaccatcttcaagctgaaaattgatgagtaactttgctgcattgttaataagaattggatttttctcagcctgcccagcatgaattagagccattagagcccaagctgtttgtacgacatttgatcgatttccttc

SEQ ID NO: 1314 - DNA, 215 bp, Glycine max
  Clone ID: V4L-01-Q1-E1-B11
ataaaaaaagactgcaattatgaatcaggagataaattaattatcctatacattttttcctagtacatgaaaatatagtacctaaatccaaactcaaaccaaaagcaaaatacaacttcgatacacgacgcacgcgcttcgtaaaaaaaaaaaaaaaaaaaaaaaaaaaaaaaaaaaaaaaaaaaaaaaaaaaaaaaaaaaaaaaaaaaggggcg

SEQ ID NO: 1315 - DNA, 339 bp, Glycine max
  Clone ID: V4L-01-Q1-E1-C9
tttttggcattaaagaagctgccttttgttttcttacatgggattgaggagttacttgtagaaagaacaatggttggcagtaggtatactacagacgcagcctagacatttgtaattttctgcattttcacgctttacgcggatgactctagcaaaatacgtgatttacaatccacctagtacaacaagctaacattctgactcatcataacaagcacttgatatacaccgaaaaaagaaacaagctcccttattattaaattaaaaagctgacaaattggggggtcaactgatgaattagattcaatccttggggttgatgcatgcgtccaagagttt

SEQ ID NO: 1316 - DNA, 356 bp, Glycine max
  Clone ID: V4L-01-Q1-E1-C11
attgaatataaaaaaattgtgtaggttatactcatttaaaaaaccttccaacaattttgtagttttcaataacttttaacttacatataagtgttgctaatactccacgttataaaatgaatttgagatgaaacatttgacgctaccaatgatttaaaccagagatgatagactaaagcattgatttatagacaaatgaatagataaacttatggtacacctatttatccctaatgcaactatttgtacaagtataggagcttctcggtacctctgttacatcatcctcaaccctattcgactttcctacaaaactgtgtgcaattctaaagtttcgaaaattagatggactgatg

SEQ ID NO: 1317 - DNA, 308 bp, Glycine max
  Clone ID: V4L-01-Q1-E1-D9
tttcatcaatattaaacggaaactaacgatacccataaatcctggtagcttcaagaaaccccaggtctaaagaagacatgaagtttaacacagccaataagcaataaacatgaaactacaaaacgagatatatcaaaacttgtcgagtataaaggaggtaaatgtccaattaaccgataagattgctctaaagttacaccttgatagcatatttccttagtgggaaatataactctttcttcttctccctctctgtcttcaatgatgcctggtgcttagtaagcctcctgcgaatagccctggtcttc

SEQ ID NO: 1318 - DNA, 300 bp, Glycine max
  Clone ID: V4L-01-Q1-E1-D11
ggatgaatgtgtcaaatgatcatgaaaaacaagttacaactcacctttaaacaaagcttcaacattcagactctcaaactcataaacactgcatcccgataaaaatattataataaagaatatgaactttctttaaaataaaacaaatttcacctagtctaagagagaagaaaacattaaagaaaaaaatgaataagaaaaaagaacaatataacttcaagtaaacccctgcaatatcaacaacacatcaaaacaaaaccttcccttaagcaaaaaaaaacctggcctttccttcctttc

SEQ ID NO: 1319 - DNA, 303 bp, Glycine max
  Clone ID: V4L-01-Q1-E1-E9
aaaaaaaggaaaagttactatcttaacatatacagataataaaaatcttcaaaagcactgcccgtcttttacttacaacgtagatgtgctcgatatgaattgaagctaaaaagataaaaaaaaaaaaaaaaaacaaaacaaaacaaggaaatgtttctaatactcatatttagttattagtattactaccagtgtggtgtcccctcccaaatgaaaattcagataaagcaatgttgatttcaagttgagttcgaataggattgagtccactaggaggcaattccgctgttggagctgggcgct

SEQ ID NO: 1320 - DNA, 393 bp, Glycine max
  Clone ID: V4L-01-Q1-E1-E11
tttagcgtgcaaaaaatggaacttcatagaatatgcattcatgatgcaatccaaaaaataatctagacatacatcctaaataaaaacgcaatatatactacacctacaacctatccatttacgtttaattttacatttcagaacaaagaaaattttataacaaagcgatggagcacgtaggtcataaaaaaagaattacagggcaaaaggcatctcatagaggataacttaaaaatagagaaagtcatcatacctacaattgttgcaggtggaagcgcatattgaagcataagaacaaattgatataacgaatacgattcaatgaatccccaataatatgctgctttaacaatcaaaattaccaagataggtgaaattatgaaccgcactacc

SEQ ID NO: 1321 - DNA, 386 bp, Glycine max
  unsure (1)..(386): unsure at all n locations
  Clone ID: V4L-01-Q1-E1-F9
ggtaatttggtatatatattttcagattatagttaccaagatgcaattcaagaactctgcaagtcaatgaaaaccgaaaagagctactcactctacacggtgcgcttgattgtagtgaaacaaacttataccatctatgatctatctatccacccaccacaaaatgccacaaactaagattgaaatccacttgcacatcaaaataaaaaataaaaaatccaattgaggaaccttaagttagagttaaacttccgcaggcattgcataatgttgcctaaccatctttgttgacaacacttcttgcatcgcacccaaaaacatgccatgtccctcctcaaattgcccgtagccattctttagatcntgtcctaagaagtttgtttgca

SEQ ID NO: 1322 - DNA, 352 bp, Glycine max
  Clone ID: V4L-01-Q1-E1-F11
ggaccgaattgagtgaatatttattactccccgaaaaaaaaaagcctaaaattacaccaagaacgaggaccaagcagttggtgaaatcaaattaagtaatctaaatagtaatttttatgtaaaacaaaaaaaaaactcattgttattatttttcaattagttactcgtcgttaccgcttaggtgattgaccttgttaccgcgcggcgcgttgggggcatcgacgacggtggcggcggacatctccatctggcaaaccctaaccgctccgatgagcctctccggcagctcctcctcgctctgcgcctccaaaacaaaccccataacgatggtgacgctggtaacataccccag

SEQ ID NO: 1323 - DNA, 309 bp, Glycine max
  Clone ID: V4L-01-Q1-E1-G9
tcgcgatctagaactagtctcaatatgcgccaagaacttttcgatgctttacgttccagaggcacacctggtgattggagtcacattatcaagcagattggaatgtttactttcactggattgaatgcggaacaagtttccttcatgactaaagagtaccatatatacatgacatctgacgggaggattagcatggctggtctgagttccaaaactgtcccacttctagcggatgcgatacatgctgctgtaaccccagttgcccaaaacatgttgttgaacgcagttttcaacatgctccctagtccc

SEQ ID NO: 1324 - DNA, 371 bp, Glycine max
  Clone ID: V4L-01-Q1-E1-G11
ctcattggactagcactttattaaaagaaagagtacatatcattttcatttctccatcttgtgatcatcatcaatcacgaaagagtggacctgagttattcattggttgtaccatttgctgtaatgagggttggtgcaacctatccttttggacttacaatggtgcagatattgagattcaaatgctccaagcttctctaggtgatggatgcagtggaggaaccatttgaaggggtccatgcatatatgagtaatcctatgatgagaatgatggcacctgcaacaaagcctgttggaagagaagaggcaacaccgaggtatggcaatgggagcgtgaacacatagattgctattgggactgaaaatgtgga

SEQ ID NO: 1325 - DNA, 302 bp, Glycine max
  Clone ID: V4L-01-Q1-E1-H9
atgtatgttgccaaagggcatagagcgtttcatatataagcttacacaacggccaacagaaacccaacaacaacaccaagtaataataatccctcccactcccaccccattttctgcttctccttccttccttcctatacagtccaattgctgtaattaattcgacccaattccacggaaatataatgataaaattaaatcaaactaaattgtgcaatatcaataaaaacaaagaaagaaagaaaaatacccgaagaataaggtgttatgataaaagccaaaaaagaaaccaaaacggggtt

SEQ ID NO: 1326 - DNA, 258 bp, Glycine max
  Clone ID: V4L-01-Q1-E1-H11
ggaaaaaattgcaccacgcaaaaacattccaaaaattttgacagtggaaattgtacccaacccttttggcgtggcatgcatgcaacaaaatcaaacataaccacccccaagaaatgttttttttcccttcaaaattgtcaaaacccctaaaggcagggcaaattccgtggcaacacaaagtttggaaaatttcaacttgcaatttttcaaacggggaaattaaatttggtgggaccaaattaaccccccctccaaatt

SEQ ID NO: 1327 - DNA, 318 bp, Glycine max
  Clone ID: V4L-01-Q1-E1-A10
cacaccaaaggatctgattcattaaaagcaatagattcttcacaaccacacaccactcacttgacatatatggaacacatacataatccatatagcattacttagtggtggggcatttcttacttttatttaatgcacaaacataacaagggcaggaaggaaaaccacaaaattaaaacgaagatcatatagctgttaataataacaacaacacatgcaacataaaaaccacatgcagttgtggtagtggcatcctcttcaaattggaaacgcctcaatggtggaagggaaaaccttgatcctgatgaagttgttacg

SEQ ID NO: 1328 - DNA, 368 bp, Glycine max
  Clone ID: V4L-01-Q1-E1-A12
acaagaggatttccaaactcttatcaaaagaagattttccgacatgcataaacgcagttcatagtttcatatatatatatttttataaatatcatatggtgatgaaggtggctaggcctcttcattgcagatacacacgacctctaagcatggcccctatagcttccaatgcagaatggtggccacatctttaacattttagataggagaatacttagggaaccaagatgaggtcattgataatggttgaagttcatacggggaaagaagatgcaaggccaaactgaaggccccaaagctcaaaagaatccttaacaaagtcatagtatcctccttttagtgacaatgtcttggtcaccaagccatct

SEQ ID NO: 1329 - DNA, 323 bp, Glycine max
  unsure (1)..(323): unsure at all n locations
  Clone ID: V4L-01-Q1-E1-B10
ttatcatataataaattttatcattaatctagagagataactgatattggatatggtgatttaagaaacaaagagtatctttgtaaatatgggctaatattgaagatgtgttggcgcctataaataataataaaaaaaatcgcactgatctttggttgcctctgctatttttgagttaaaagaaacgaagaagccattaccatccccagaccaggcttatagctataactattctagtattctgtatattaaactttggggtggcacagtatctttgcatcanaagttacaaccatagagagcccaattacagatgaaaactt

SEQ ID NO: 1330 - DNA, 317 bp, Glycine max
  Clone ID: V4L-01-Q1-E1-B12
ttttacatggaaaacaattatcacacctttatatgccacagaaaattctgagtggcaatagttgcatatataacttgtgtctataatatcgagtttaaattacatgtcaggaagagctgaaagggttcaccgcatccctgccttctgtacaataataacttccttggcgatgattggtgcagtatggattactatattcagtatttcaccgacatgtaaaccgccccttctgcttcaagattaaaaccctttcgaaaaaaccattccatgttatgctttcccgaacaatttcaccttaatcccaaacaatacaaaac

SEQ ID NO: 1331 - DNA, 333 bp, Glycine max
  Clone ID: V4L-01-Q1-E1-C10
gtctacggaacagattgcaataaactatttttcaaaagtccttacgattaaaagaatccacgttttctcgagataaacacaaaaatttcaagttacaaaacccaaagcaagttgttctaggagagaacagccatgacatctgagactctcaaggtaatatagtcagaaccatctttgcccttgaagtcatttccagcatatttggagtacaaaactgtgttcccaggagtcacggacaaaggttttctgttgccttcctcgtccaaatgccccggcccaaccgctatcactgttccaatcgaaggtttgtccttgggtgcctctgttagcaac

SEQ ID NO: 1332 - DNA, 285 bp, Glycine max
  Clone ID: V4L-01-Q1-E1-C12
tacatattaaaaagcaaaagataaaaatgtagagcatcaaccacatgggtagtgttgcagttgtttacagggttcaaaattaatgaacaccttaaggacccacattagactcttgaatgtctaacaatcaggaccacaacacgaaaaaaaaattatatatagcacaaaatgtaacatggaaataaagcaaactatacactgcttacataaacatggttcatgccagccccacctaaacctctgaatcgtttgttatctgctttaccacttgctgcgtcacaaaat

SEQ ID NO: 1333 - DNA, 304 bp, Glycine max
  Clone ID: V4L-01-Q1-E1-D10
agtacaagctacttcaaataaatttcagtgactacagtaatcaaagttaaatcccatggttccaaaaacttcctcaagtgcaagcctgtgcagttatagagatagcatgacaccaattcatgaatagagtctaagcttctctagtttccaggtacacactatataacctaccttatgacagcaaaagaaaaaaataataacagacccttttctcttctcctaacagaaataatatgaactttaccaacaccttcaaaccccaactactcaaacttgatggaccggtatatgtgacgaacaaaga

SEQ ID NO: 1334 - DNA, 248 bp, Glycine max
  Clone ID: V4L-01-Q1-E1-D12
ccaaaccaaagtgacattaaataaaaaagcggggcggtcaaaaaaaggggaaaaaaaccacacatgtagttacaaaaagatttaaaccccaaacaaatttatggaaaaaaaattgggcgtgaaaatacgattcacccaacacattagttgaaagcaacaaaaacttggaaagtgttcccgaaagggggagcccctaaattaatttattgaaagcaaaaacaagggggggcaaacttcccaaccccaaa

SEQ ID NO: 1335 - DNA, 327 bp, Glycine max
  Clone ID: V4L-01-Q1-E1-E10
atagtacaaggcttcatactgtaatataaagaattatacgtaagtaacaagagtaatatatatcctatacaaactctaaagaatcaaagaatgatctgctgttcattgttttagcctattctgatgaaaatctacattgcctcacataacaacatacagttacgtatatttaaggaacaaggtgaatacacatgtagggataggcatgcttgacattatggctcttaaaagatggtgctcttaagaactgtggtttctgaggaaatgacctttcaagcaaaattcgcaagggattaaaatcatactcgtagcatcgcttccgtgttt

SEQ ID NO: 1336 - DNA, 247 bp, Glycine max
  Clone ID: V4L-01-Q1-E1-E12
aaaacaaaaaaattcaaaagccccccaaaataaacccaaaaaatgggaaaggggaagaaaaaaggatttttcaaccaacaaaaaagaaagtttaaattaccaaaaaaacggaccaacaaaggaccctgaaaaatcagcttaaaccaaaccggaacctaaaaaaaggggcaaaaagccatgaaaaaaacttagggaggggattcccacgcaaaaaaaactaggccccaaaaaaaaagggggtgagggg

SEQ ID NO: 1337 - DNA, 279 bp, Glycine max
  Clone ID: V4L-01-Q1-E1-F10
gaataacagcccggtagactgtagtattttttattgaaattataactatgaaaaaatgtaaatactagaactcaaaggtagctcctggtatttacagcatcccgccgtacatatagatctctctcgctctctctctcatttcgtgaactaaaatgttctacattgacaatggcatcaaaactcaatagaaaaagaagaaaaaagcgaacgaagtatgctcaacaacttgtgtctgatctgggtgtttcattgtattgtaaaagaaaaatctggcgctgc

SEQ ID NO: 1338 - DNA, 148 bp, Glycine max
  Clone ID: V4L-01-Q1-E1-F12
tttctaaataaaaagtaaattttcaaaattaaatatttaatgttgaaaatttactttttatttagaaaaaaaaagtaaattttcaacattaaatatttaattttttaaaattccataatcagtgtgcaaaaacatatgcacacaaaac

SEQ ID NO: 1339 - DNA, 317 bp, Glycine max
  Clone ID: V4L-01-Q1-E1-G10
gcaaaacagtaatgtcaatagataccaactgttacatgatacaggaaggtgtaccattatcttgaggtactgatatctcaattagcaaaaactaactataatcatttgaaagcagatttgagacgtcacaaatcactagactaaacacggctaggcttatgactcagtcttgcaaacacaacatctatgtagcatttctgtttactttcagatatggcaaggctccaattacattgtcatagtcgctcctgctgaccgcatgcattttggagagtccggatttgcgcttggtattcttcttaacgagcaaatgctgc

SEQ ID NO: 1340 - DNA, 123 bp, Glycine max
  Clone ID: V4L-01-Q1-E1-G12
acaagcaaaactgaatggattttatgttgatccactgtcaagccttttacactgatctaatcatgcattaacacattgtaaaatgagctttgactatgataacaactacttgaaaactttatg

SEQ ID NO: 1341 - DNA, 240 bp, Glycine max
  Clone ID: V4L-01-Q1-E1-H12
ccctcgctcgttttcacttttttcaacctggaacattccttttgatactgatattaacagacacaatggtcagaaaacacggggtacattttttacttgatcatctaaaaggttacaactcaaaggcacgagaaacacaatatgacggacgaccactacacaaaaacacagagcagcggacgtggaaacttatgcacaagagacattatcacggcaaccctaaaaaactccagcacattg

SEQ ID NO: 1342 - DNA, 1186 bp, Glycine max
  Clone ID: LIB7-01-G3_FLI
attcggctcgagaaaataataacaaaggaatcttctctttctctctctctctctctctttgagttgagtttcgagttgcgccattttcacctgtcctctctctctctctctctctctgtcaccgtgttgcaagtatgaaggactgttggtttttacaacaatttcaatggtctgtcggatgagagtcttgatgatgtgatggacatggagcttttggatttgccccttgactttgaggatgtggaaactgatgctgtggaagaacaagattgggatgctcagctcaaactccttgaagacccaccaccaccacttggagttttcccactacaacaatcctctgcattctgtggacaaactcggaatgagaatgcgaaactcggcagcaagagtttctctgcttctctagcgaagactgtcagacctgcatatggcaaaactattcctgtccagaaagtctctttaaaaggaaaagatttgctccaattccaaaccaacagcccagtttctgtttttgaaagcagtagtagttctccctcggttgagaactccaactttgagttacctgtcatcccaacaaagcgtccccgtaccaaacgccggcgtctctcaaacatcagcctgctttactctattccttttatccttacttcaccggcttttcaaaaatttcagaggatggatttctccaaatcagatatacaaacacagccttctggggaattattatgcaagttcaaaaagaagcagaggaaaaaggatattcccctgccgactaacaaaattgagatgaagagatcctcatcacaggagtcagttgcacccagaaaatgcttgcattgtgaggtgacaaagacgccgcaatggagagaaggaccaatgggtcctaagaccctatgcaatgcctgtggggttcgataccggtctggccggctctttgctgaataccggcctgcatctagccccacttttgtagcatcactgcactcaaactctcacaagaaggtcttagaaattaggaacagagccacccaggtgactgttagataaaccttcgttgaaattctctagattagtattgttttagattttattgagtgcttgtgctaaacaggattgtccttgattattgttctccttttttatggactaatcttaatcttatattgcttagctagttagcatc

SEQ ID NO: 1343 - DNA, 295 bp, Glycine max
  Clone ID: ASG3244V4R-02-Q1-E1-A1
gaatggtgaaattttaactttaaaaccattcaaaagtgctacagcgcatatctacatttgctaaacaaaagagatctacataaataaaaaaagaaaaacaattgcattcatcactacactactgcttcgaatccaaagaagatccgccctcatcatccaaaaaggcaccaccacctgaatcgttggaatttttcactgcttccaaattcccatagttttcacatagctccgaatagactccactgtctaccttggataccccagacagtgatactaatcccatagcagcaatgct

SEQ ID NO: 1344 - DNA, 396 bp, Glycine max
  Clone ID: ASG3244V4R-02-Q1-E1-A2
tcatgaaataggcgtttaccattcttggccaatcatgaggcatgatactgacacaacagagtattctagaaaaatgaccagaaacaatatctttgatttcactgttggatctgatatggctaaacatttacaggttattgctcttagcagagacaaaaatgcagatataatgttccacccaacttttttgaaagtttgaactaccagatttgaatgattaactatacaataaaccagcactataaccccggcatacaccctcataaaaaattgacgggaataatagctcttagcagatataatggagagtttttggctgataaagtccatctatcaacatctgccacaaggacaatttagatatcaagcataaagaatcattacggccacaacatc

SEQ ID NO: 1345 - DNA, 383 bp, Glycine max
  Clone ID: ASG3244V4R-02-Q1-E1-A3
ataacaaatacaatctcagtgaagttttattattaaatagaatacatggcacactgacagaccttacattacaggtagcaacctgtattcacaaactgctaaacgtttcatcagatgtaatatttacagaaggaggaagaatggtaaaagaacatcaccaacaacctaatcaaagtacaattttcctttccaaattgatatctcccctccaccagattgtcaaacgatttggttattctctcaacacaatttcaacggatgacagaataactcaattcgtcaacaacctaaagtagaatggagtaataatgtaacatgctgataaaacttgttaactacggagaccatgacaatgaaaacgataactagcattaaatccaact

SEQ ID NO: 1346 - DNA, 401 bp, Glycine max
  Clone ID: ASG3244V4R-02-Q1-E1-A4
gttcagacaatggtcaaaatatatattgccattccgtttgggtctgtaacagaagcagcgaagcataaaaacaatgcatccaaattaaaacccacaacggtactggtacatctgaacatcaaacacaacaacagaaaaagaccacaagaacaagaatctgaagtagattctagtagtcttcgtcctcatcctggccctcaccagactcagcacccacttcttcataatccttctcgagggctgcaagatcctcacgggcttctgaaaattcaccttcttccataccctcacccacgtaccaatggacgaaggcacgcttggcatacatgagatcaaacttgtggtcaatgcgaccaaacacctcagccacactggtggagtttgaaatcatgcaaactgcc

SEQ ID NO: 1347 - DNA, 345 bp, Glycine max
  Clone ID: ASG3244V4R-02-Q1-E1-A5
gaaccagaaccacaatatgaaacttgttattattttataaaggcggtatacattgaacttgttcgttattcttttcataaagcattagaagaaatttacgtttttccgggaaaacattcgtaagtagcaccccaagcagagtctcaaagtcaaaatccaaatgcaacttgatatgaatccacgccaaagaacttaaacctttttgagaaattccatgacgtaggtattgaaagcacagcacaggacttggaaaccttggaatccagagcctttggccagagcctcaaactctttctctgttctctctttcccacctggattgtgagccaacatgatcacatcgat

SEQ ID NO: 1348 - DNA, 383 bp, Glycine max
  Clone ID: ASG3244V4R-02-Q1-E1-A6
gaacaaatgagaataatattattaacaattaacaaaattttatcatgtaaatatgcacctggacaacataatttctatggccagatatttaacgcacaattcaaatttacaatgttattattgtcatctctaaatcaactacctgattcctgaaaaacaccccactgtgccagtatgattcccactaattctcaacagagtcaattaaaaaccttcatcatcatgctagaggcagccgattccgccatttccagcagaagtatgcaccccagctagatatggttcaaaatttacagtgacagctctccactaaagaaaaaactatccaagcagatttggagaatgtcactaaatttggcgataaatgacagctcagaatttac

SEQ ID NO: 1349 - DNA, 389 bp, Glycine max
  Clone ID: ASG3244V4R-02-Q1-E1-A7
tttaatgtttaactcgccaaccaaatcaaattaaatttaaatgtacaaaaaaagcaatgcgccaaacctttaaaatttggtaataagaacacaaccatgaaatacactaaatagaaacaaattataaataaagtcaagatgattgacagcacatattcctcttagcagggatttcctgtgcagggcctggaacgataatcttctggccagacaaagatgctgagttcccatttccctgattttcatcagcagttaggttcttcttgttgacaatgttgtatatttctgtcaagacagttatgaaggctgtttcaacattagttgcttctagtgctgaggtctctaagaaaaacaacccttctttctcagcaaattcttttgcatcctca

SEQ ID NO: 1350 - DNA, 387 bp, Glycine max
  unsure (1)..(387): unsure at all n locations
  Clone ID: ASG3244V4R-02-Q1-E1-A8
agccaaagatataattttattcgaaaaagagatgagaagatgagcccaaagagtgggtcatacaaatgcattaatttgatttgatcgttcctactacaagctagaattgtaatcagaatgggaaagcacccactgaaagacacatcatctcccaaatctacatcttaatattcttttgcccacttcttcataatcatatatccacatattccaccaacacgcacaagggcttcccgttcaaacgttcacgacccttcaattctggtaattcaattacacatgcacactccactacttctgctcncacacgttctaaatgacagcaagcaagcaaagacatcaatataatcaaaatccanaaatgacataaacaggggggtaataaag

SEQ ID NO: 1351 - DNA, 388 bp, Glycine max
  Clone ID: ASG3244V4R-02-Q1-E1-B1
aagaacccagcatcacacaagttattttttcaaatcatttcagattctgttatacacaatttagaagaagaaaaatgagtatcgacctttataaatccacctcgatacaaaaggggactttacatccccaaaacaaaatgaaatagatgcatttcatttgatccaacagctaaataaattacaaattataacaatatatttgaaaccagtgtggaccttcaaagtgaaaattccatcagtatttaaccttcctctccaaattcctttgtgaatctctcgtgaacatcaaggtcggctttgcttactgtaagcctttgtctagcgagtaccttctcaaaatctgtcctcgtaatagggggcggaaggatcttagaagcaagtccttttg

SEQ ID NO: 1352 - DNA, 376 bp, Glycine max
  Clone ID: ASG3244V4R-02-Q1-E1-B2
aagacaacaatatgaataatataaggtttgcaatgagcaggcacaaccaatcataagaagaaatccagataagttaagaaaaaagaatgatactgagcaagtaggaagtataaggcggggtttcaagatgatgtacagcaagaaggcttgcttgtgttggattggggtcccccaacagtgatagtcatgccttctttaatattggcagatgcaggctcattggaagagagtgatttcttactgataatgcggtatatctctgcaagaatagtctggaaagccttctcaacattagttgcttcgagagcagaagtctcgatgaaagaaaggccttccttctcggaataaccctgggcatcctcggtggcaacagctc

SEQ ID NO: 1353 - DNA, 392 bp, Glycine max
  Clone ID: ASG3244V4R-02-Q1-E1-B3
agagaaaacaatttcattataatttgaactgagaaagtttacatcacaaaacattattgcgcactcagattatgaaagatcaattatttctgttgaaccgtgcatataggaggaataagaaacttacccccaaaacagtgaaaacagaagatcaaaagaatgacatacaacgaatggaatcaaaacacgaagttttaacccagtgcgacttctttaaattttagaatgcaatccaatgcttttttgaaatcattttcttcgagtgcaatattgaaccgacagtatccaggaattccagtccatgacccactattgatgcataatccagtggctttgagaatgacagtcctgatattagagtcatcgagctttatttccttagtggcacttcc

SEQ ID NO: 1354 - DNA, 265 bp, Glycine max
  Clone ID: ASG3244V4R-02-Q1-E1-B4
ccaaaacacgggggggtctttcaaaaaaacaaagttaaatccccttcccggttgcaaaggtttgaccaaatacacggaattacaaaaattgacaaaaaaggaacactaggaaaacaaaaagcaaaattccaaacgattatccggggaaaagtcaacccacaataatacttatcaacaaaaaattcggttgttgtacccaaaataccgattccaaaccccactagtcccttcaaacaacaccaacttcgattgatcagtaccggta

SEQ ID NO: 1355 - DNA, 357 bp, Glycine max
  Clone ID: ASG3244V4R-02-Q1-E1-B5
aaaaccatacaaacatcctggtagatttacaggagaactttaatcacagaacattccttttactacttaaaaaccatagtacacatacgtagaagtacatgggaacactatttatgagacaccttattataacttatgaaacatacagaacatgctagttgtattttttagagatgaaggcccagttgccaagtttctccatgtagagtccttctctagaaatacacgcatgtcatatttaatcatatacaggccttgacgaacgtactttatagcaacgcaaactcgtggaacagtataagtcaaatatccgatgcaccgttcccagcgtgtgagagcaacacacacctctactcc

SEQ ID NO: 1356 - DNA, 388 bp, Glycine max
  Clone ID: ASG3244V4R-02-Q1-E1-B6
aagtaaataaaactgtataaaatgttttatttttataagtataaaattaatacttttttataacaaccaaaatattactttttaaattttggagagatccaaacatataatagtaataaaatcttacaaatactaataatactaaatacttttttgttgtttagaaggcttgaaacaagaacttgcatagccatacacacttgactccaacatgaacttaatatacatttgattgaaaatcagaaattttcttggtgacgaaatccttgacctgtgagatcaactgagatgactcgggcaattcaggaaatatataaaacgcatgaatcgacgatggatactcaatcaattgagcatttttccctgattttttcaaccactcataata

SEQ ID NO: 1357 - DNA, 381 bp, Glycine max
  Clone ID: ASG3244V4R-02-Q1-E1-B7
cagacaaaattatttcctttatggtctttataccatagtcaacagctgccaagaaacagattacctttttttctctttttgttttccttcaattcgatcccaagataagcatataatgtaaacacagtaagtctttctacaactaaaccgaacagtggtagttgagtttctgatgtttcttggccgtcctagttactttccacaatcacctagtactatgggatcaacattagaaatacaacttctccccatgccgagcaggaagtgggacagtagttataattaacacacagaactgctaccgttaaacggttagtgattacaaacaacattgcaaaagtaaattggattaaggtcgtcatatcagtggttaccatcttc

SEQ ID NO: 1358 - DNA, 387 bp, Glycine max
  Clone ID: ASG3244V4R-02-Q1-E1-B8
attctaatacgaagtttattcgattaaaaagagatttatataggacctaatacaagtataagaatggagaaaatcaaatatcctttcaagtcttgcatattcaaaatgcaactataaggagttgacaaatttattcctgaaaacaaaagagactattttctctaactacaaaatccatcctcatcaaatatcaattgggtacccttaaattgacggataaaattcaagtaggacttagtcacggaactcatccatgaatttttcatggaactcagtcaagcgggtgacgatggccggaatcttttcttctggaggcaatatggtgcacctaaaatgccatgtgccaggaacctgtccaaaaccagaaccaggaacaacaacgactcc

SEQ ID NO: 1359 - DNA, 384 bp, Glycine max
  unsure (1)..(384): unsure at all n locations
  Clone ID: ASG3244V4R-02-Q1-E1-C1
tttttgccgctgttagaatcaatctcattttcattttcactttattgtggtactcacacaggctcttgattgccacaaatggttaaaaaaaacaaatacacatttctgaagattagaaatagctcaagcgagactctattgaacgtccattggtttgacgccgaggtgttccaatctcacaagcattgactcttgatgcaaacctgagtgagcatagtgactcaccaactgaagaaggatcaggtgatatgttcacaaacattagtgtcttggagtctccacctagacaaggctgaagcagatatgtaagctttgagtttctgaatggcacatggtcctccttcttggctaaggcannatatacatcactcagtgatgataaac

SEQ ID NO: 1360 - DNA, 399 bp, Glycine max
  Clone ID: ASG3244V4R-02-Q1-E1-C2
ttaactccaaatgtagcagattcattaagattttatacaacattacagcaaactatatatatagaacacatacaattcatgatttcattaaataaataagaacaacgcaaaatttataacataccaagatgatagttttacaaaatcaaccattgcaccaagaaaaacatcaagcattcttatttttaacccctgaaggagaggacttgaaccaaggtatccacacagaagttgtattctgatacaccctaaatgcttctgctctactttcttgtttcaacattcggtcctccacaagcctagtcacataagccaaacacatagtattaacaaaagctccaatgaaggtccatcccactcccaagctccatgcaaacacaaccagcccccaccaccaca

SEQ ID NO: 1361 - DNA, 396 bp, Glycine max
  Clone ID: ASG3244V4R-02-Q1-E1-C3
aaaaagtgaggcaacaatggtggcattcttgaacgttatctgttctttaccatgtacacataggtcactatgtcagcatcaagcaatgtgcacttacacacactcattagcaacaggtatacacaatttaatctggtcactatctatgaggctatataacccagtctatcgaccaacatttacctaaaaagttacacataactcttaaaaatataagaccaatatactcagatgtatacgaaacgtttgcccggttgttatgccccactctgatcatcagcacgataaaaatgcagtaaatttatgggttccactttttcctcaaatatctcttcagattgtgaagggaagtgaaacccagttgagcaattctgcaaaacttcaggactcttgatc

SEQ ID NO: 1362 - DNA, 228 bp, Glycine max
  Clone ID: ASG3244V4R-02-Q1-E1-C4
atattaatgttatttattagtaaataaatataaatttaaatgttaaaatgtactttgtgataaatctaaaaataaaaagaagaaaaaaaaaaaaaaacaagaagatatacttcaaaaaaaaagagaaataagaagaaaaaaaaacaagtgaaaagccacggaaaacaacaaaacatgtaacataataaaaaaaaacaataaaaagaacaaaaattagcaatgcacaga

SEQ ID NO: 1363 - DNA, 374 bp, Glycine max
  Clone ID: ASG3244V4R-02-Q1-E1-C5
aagaaacatgtcttctgtacttatctattgctgttcaacaaatatccaattcattgaggacacaaacattgatttaagttaaatccccaaaattcatcttacattgactacaccgaaaaatgaagtatcattctgaggaagtgtaccgcagtaaacccgacgcgatacttgcagtatcgttgctagtctaacaagaatgcagtgagtgaagaaggacaattttgaaattctttacaaacgtcaacatctatatgcctgctaaactccaatttcattaaccaaaaaaggggcccaattgagtcaatatttcttgactcatggactagccgcttgccacaatctcatgaatggtatcgctgacagtttcgtcctca

SEQ ID NO: 1364 - DNA, 360 bp, Glycine max
  Clone ID: ASG3244V4R-02-Q1-E1-C6
ttaattcagtaatattgttcagcattaaaccacatctttaaataacattattgcctaaacgttatgaataaataagaggaagacatgagagaataactatactatagtattttacaattgaaagaagcaggattttttcttgcaccagcagggaactctgttaaacgtataagcattatgtatcaaaactaaacagcaaataaactgcagcggcacctgacacagcatcaccaagtgacaagaaacttgaccatttagataccaaaattgcaggcctgaacgaaatctaattcatagtcaacatactttgtccaaagtggcttgaactgagtcattgcaatgtcgagccatggtttcata

SEQ ID NO: 1365 - DNA, 386 bp, Glycine max
  Clone ID: ASG3244V4R-02-Q1-E1-C7
ggtaccgggcgaattaattaagattaagcttataactgcaatatataatgctagctactcgatagatcccgggcgatacgacatcttgatataattctttacagtaactgtaaattaataatctgaaaagagtatagatgtctatggaatattgtgatgatgttccttagtattaggtgggggtagggcggaaggagcatgagaatagcgtctggaccaaaagagatagttgaggaagttgaggaagcttaagacagccagtaaccaatagaaaagatcaagcctatcctggttaaggttgttgttgtgaagccagccagcagctgaagaagaagttgaagtgatcttattgaccaaagaaaccaaaagtgtgctcaagtaaaagc

SEQ ID NO: 1366 - DNA, 380 bp, Glycine max
  Clone ID: ASG3244V4R-02-Q1-E1-C8
aagaaacatgtcttctgtacttatctattgctgttcaacaaatatccaattcattgaggacacaaacattgatttaagttaaatccccaaaattcatcttacattgactacaccgaaaaatgaagtatcattctgaggaagtgtaacgcagtaaacccgacgcgatacttgcagtatcgttgctagtctaacaagaatgcagtgagtgaagaaggacaattttgaaattctttacaaacgtcaacatctatatacctgctaaactccaatttcattaaccaaaaaaggggcccaattgagtcaatatttcttgactcatggactagccgcttgccacaatctcatgaatggtatcgctgacagtttcgtcctcaaatctg

SEQ ID NO: 1367 - DNA, 343 bp, Glycine max
  Clone ID: ASG3244V4R-02-Q1-E1-D1
acaaatcttaagagcagaataatagttttgataagatttgcaaaacaagaatacaatattaaaaaaaaggcaacattccaaaagccctaataataaaacctcacgattgcgagatcagaatctgagtttggtaaagaaccacctattcttgccggtcttgaacctctcctccaaccgcttcttggtctccttgagagcagtgaccttcttgtccttggtgccgagaacatcaggggtaacagcatccttgagatccacgtcgaacgtgtaacgcgtgggcatgaggtgctggtagttcacgagcttcacgaacgccttaaccctagatttcttgggcgtcttc

SEQ ID NO: 1368 - DNA, 318 bp, Glycine max
  Clone ID: ASG3244V4R-02-Q1-E1-D2
aaccgagcaatgcaaagctttaatcggtcaaaacattgtgttatttacagtacatgcaaaaacctgggggaataatacagtttctagtcagagtagtaatagtaaccatacatcatcttcaaaactagtctaataaaccaaaccatattctaatcacagttatcagataacttacaactccgtaagtaaacaaagaaaaacaatcttccgaaaacatggaaccccttgtttgaaaactagttacaaaattcaaaattaaagttgggctttaaaagctttgcactgccagcacctgcaactgatccagaaaaacttcca

SEQ ID NO: 1369 - DNA, 307 bp, Glycine max
  Clone ID: ASG3244V4R-02-Q1-E1-D3
atgttataatatttgtctagagttacaagtgcaacacagcaccaacacgtaaaaatagcaagctaaggtaaagaacaaaaatgatcaggaagactccaaaggatttaaggcaaactaactcagcccgtcagtcacagtttgacgctcttaatcacaaccccacccccaagatcaacacccaccagcacggggaacaaacattccaaatcgttgtacagagtaagaggaattcttggtcgaaacgattttcatttcgagccagctggctttgatatagtcttctctggtgcacacgggcactctagga

SEQ ID NO: 1370 - DNA, 361 bp, Glycine max
  Clone ID: ASG3244V4R-02-Q1-E1-D4
caaaatgcaatcaattgggacaaaattctgataaaatttccattgcatcaacacagtaacattgcatagccaaacaataaattgtgagtatagggagaaaaaaaaaaacgaacagtttaggtattgatgagatggcattagacattgaatggagtagtagtagtagtagtcatgaaacacgcaaattattcatccacacccagcaagacatccactgaagggagtgattaacttaacaacactcttaagcttgaggcttctctgacttgagtggcttcacaacttcccaggtgaagtctgcatcatcccttccaaagtgtccataagcagctgtcttgaagaacctatgaccacccctctt

SEQ ID NO: 1371 - DNA, 392 bp, Glycine max
  Clone ID: ASG3244V4R-02-Q1-E1-D5
tttggttgaaattggcataaactaataaaacgttcaccctaaaggatgtccaattccctagaggtggtcgacccacagtcataaaaaacgtacatttgaattggtaccaacttccaagaactaaagccaaatagaagtttagaaaacactaaaattaagcagcaccctttcccttcttcctctggagtttcttcatgtaaaactccagctccttaccttcaagaatgtacccatcagccctgccacattgtccgggacgagaagaaatacaggccaacaatcgcccaccaccaaattgctcttcaatgtgggagtcaagattacgatctttctggcgtttctcaagttttctctgcacatggttacttttcttagtttcttcagcagcagcc

SEQ ID NO: 1372 - DNA, 359 bp, Glycine max
  Clone ID: ASG3244V4R-02-Q1-E1-D6
ggccaaggtgtaaaattgaatttatttcggacacgaattacaaatgtcaccttcgttctcctagatagaatgtcggagtagttctataatgcaccttgcacattggggggtgaggattgaaatgtaaaatcaacttaagggagcatggatgtaccacacatgcaaggtgtattgtaggattagtttagaatgtcatttaggagatctttcacatagttacccactttgttcaagtttttggcaacaccagatgccaccaggcctgcatttctttgaaacctattcaagaactctgtcgcatgatttggaggtatgtatcttcgaggttgaggagcagcatgttcatcgtcagttttatg

SEQ ID NO: 1373 - DNA, 361 bp, Glycine max
  Clone ID: ASG3244V4R-02-Q1-E1-D7
gactacatcatcctcatagtccaggatagatcttgatgtaataatataattaagcagggtcggtccatcaacatatataacatgataatatgaaaatgtcgagataagactccacatcaagattgaattaaatagacattagaaaacccaaatcgaaagtagattaataataacagtattactgaaattaattacgtaattaattctcattgtcgaactcctcgtattgcctgaggacctcagcacagccagaagcaacctcctgagacatgaagcccatggcattggcgaacctatcatcggatgcaatgccgttgtaacgggtgagaataacgacggcttcgtcgcggcccggggtgac

SEQ ID NO: 1374 - DNA, 361 bp, Glycine max
  Clone ID: ASG3244V4R-02-Q1-E1-D8
aaaaaagaaacaccaatcatcgggcatttagttggattgaacatttagagctttaaaataatagcagtttcatattgtcttccctacaaacaacaggttacataaaaacggaaacaaacagaaccagttttatagaacagtaatggaaactagatctagccggaacagaaccatcccctcaaaagagacaatcaaccggcaacaggaagttgcggcatgttatacatcttcaagccaccgcaatacattaccaagttcaaaatcacatatcatgttggccatactcctcctcctcctcttcctcctcatactcatcctcatcagcaatggcatcctggtactgttgatactctgacacaag

SEQ ID NO: 1375 - DNA, 353 bp, Glycine max
  Clone ID: ASG3244V4R-02-Q1-E1-E1
gagataaacttcgaatttcattaattaggttaattaattaaactaaacaaagctaccatatctccaccccttcataatagtaataacaagaaagtaactatgttacagaaattacagaaagaaaaaaaaaaaaaaaagagatactagttccatatccattttcccttcccaaatttacataagatcatcctagctagcttcccctgctagattcattaacccacgagaggggcaaaaagggaaaaagtaaaaagaaaattttcagagaatctatctcatctcatattctcaatttttttttttctcttctttctttatcacatgactttccacgactcgagagtggggaagct

SEQ ID NO: 1376 - DNA, 318 bp, Glycine max
  Clone ID: ASG3244V4R-02-Q1-E1-E2
cttttcttcttcttctcgtgcccagcagacaagactttgaaacctacatgctgaataagcaagatcacatcaacacttgttactccataatttgaggacaaaagtcatacaaaggtcacttgggaatcaagcggtaaaatgactaccagattgaccctgtccttatcccgcatcatgtgctaacttaaaaccagcgaaatgacaagtgtgccagtgccaaacaaaattgatgagagtggtaacgagcacgattaccagaacgaatattacatcgctccagacgagtagggaatgactacggctagaaagatttcaagc

SEQ ID NO: 1377 - DNA, 377 bp, Glycine max
  Clone ID: ASG3244V4R-02-Q1-E1-E3
tttgaacaaagaagggcagacataaatatatttatagaacacaaagtagtacacaactacaaatccgatgaaaactatgtacacatactcaaaagaacacccaaaaaacacagtatttccagaaggaaacatgacaagtagtacacgtcttttcattttttcaatacaaacaaacaactagagctaatttcctagaacattatgtggttcaaagttctccttgttggaaattttgaaaacggaatccttgtcacttgtcttggcaggagaaaactcaaaagtttcatcagacctcttttttgtaggttgtactggggttccaatgtgctgggagagctctctttggttgccacacagagtgaatatattttgaattc

SEQ ID NO: 1378 - DNA, 384 bp, Glycine max
  Clone ID: ASG3244V4R-02-Q1-E1-E4
cacgagaaactctaccatgtgagttttattaacagctattcactccgacaacagataaaataaaaacttgagcaccttttttcttctttaattaatcacggcctaatctaaccttggatacaagtcactactgcgtcaaaaatattaaaaataaagaaacgccgttagccaggcttacggcggaagcttgcacggactaggtggaagacttgtcttcccagtagcaacaagacgttgcacgaagctctcaattctgttaccgtttgtctcctgcagtaaccgttttcccccaaacggtaacgattcaaggactctctcgttcagtaccttctcatcatcttttccttgatctcctaatccgatagcctgaatcctgacatagtc

SEQ ID NO: 1379 - DNA, 364 bp, Glycine max
  Clone ID: ASG3244V4R-02-Q1-E1-E5
gcactagaatataaatacgaattttattccttcccacggttaatgataacaagtccaccgatatcttactacgtaacatgcatataaattatgcacaagtccataaaatattataatgatacgaaaaatagtgtaactatcctatgcaacatacaacaaggttccgatctctttatcagaattggtgtcaagtagctcagccaaagtgtaaaatgaatggcaatcgagctcaagcctttatatagcctcctgtaccttactaagctcaaacaccaaccacaacagcaacagcataggcctaaacagttttaattcattattgatgtacctgcaccaacaattcccacatcaaatgctcataaat

SEQ ID NO: 1380 - DNA, 315 bp, Glycine max
  Clone ID: ASG3244V4R-02-Q1-E1-E6
aaacaaagaaaacccttttttgcaattaattaaattttcaggacggtgtcaaaatggaaaattcaattgatcaaaacaaaaaaagatcaacccaaaaaaaacatctttgcctgttcaaaacagtgaaatagtcaaatgtgattgaagcaaaagctccagctttcacttgcagttttccacggtcagcttatctagggaaaaataaaaacaaaaaaacactacaactgaaaaagatataactttccggaatataacttccgctcaccctttaaccgttttgcaaacttccaaaagttcaacatgtaaaccctcttc

SEQ ID NO: 1381 - DNA, 332 bp, Glycine max
  Clone ID: ASG3244V4R-02-Q1-E1-E7
accacaaacacttcatattcataacatcaaagggaatgttgatgagtgtctagtgattacatgacgagaagatcctaagcctaaactgtcattagtctagataaattacatacaactaggaagctatatgagcagttaacaagggtgaagggtcaatttcttcttaagatatctttcgaaatttactagttttctgtgctgttttgccaaaaggttacatccctactttatattgccaaagcttcggccattagttaatcacttcggagagatgtcttctataatgcccttcccatcaaaagcatcaaaaaagaaaaaattctttaaggggt

SEQ ID NO: 1382 - DNA, 362 bp, Glycine max
  Clone ID: ASG3244V4R-02-Q1-E1-E8
gacaattaatcatttcatatttcacacattcataacaaacgtaggtgggatattagagtactattattaatgggacacaattgagttcaacacaaaccgaacttattttcaagggacattattacagacccattaaacatcaaagttcttcaaatgttttgggaacacatccaacattacacaacgagcttaaaaccccccacggagacggaggacaaggtgaagggttgattccttctggatgttgtagtcagcgagggtccttccatcctcgagctgcttgccagcaaaaatcagcctctgctggtcccgtgggatgccttccttgtcctgaatcttggccttcacattgtcaatggtgt

SEQ ID NO: 1383 - DNA, 368 bp, Glycine max
  Clone ID: ASG3244V4R-02-Q1-E1-F1
aatatattaaaatagaaaatattattataaatatcatgtgaaaacataaaaaattaacattaatttacattagcctaataaaatcaatatcaatatatattacaatgattcagacataaacatgaaaatcatccaaattcctgcaacaaagaagctgagtgcgcgcacacatcatcaatcctgaccatcagacaattttgatatgaaaaatttcactaaaataacttcttcccactttatttctaaggttcgaacccttacttatgttttattaaataggcgatgagttggtacagctagcaagtgcttacttcttggtaatgaaaggccaaaattctcagtcatatctatgtcatcaggagacatgc

SEQ ID NO: 1384 - DNA, 323 bp, Glycine max
  Clone ID: ASG3244V4R-02-Q1-E1-F2
tttttttttttttttttttttttttttttttttttttttttttttttttttttttttttttttatttttttttttatttttttttttattttttttttttttttttttttggggaaaaaaaaaccaaataaaaaaggaaaaaaatttccccaaaaaaaaaaccaagggaaacttccaaaattaaaacaaaaaaaaaaacggtaaaaatttcaaaaaaaaaaaaaccaacggcaaaatttggaaaaaaatttaaaaaccaaaaaacaagcaaaggaaaaaaaaggaaaaatacaaaaaaaaattaacaaagggaattcccaagg

SEQ ID NO: 1385 - DNA, 392 bp, Glycine max
  Clone ID: ASG3244V4R-02-Q1-E1-F3
caaatgaccgacttaatgttgactttttttcattgatcaaatcgtttcaaatcatctattctataacaaacatttcccagaatatatatgaatgctcaaacaatgcatggtgtgttatcacaaactaaacattgaacaactagagttaaaattttggttcctcttttactttcctggcagcaaatcgtaaatcatcctgtgcttcacatgagcgggggcctgtaatgagtaccagcatggaacccttccgtatatgctgtgttcttaaatatcatagcaaggctcttgaactctgcattgaggtttttctgtaatttgtcagataacacagtaccgagctgctccccgtgtaactttatattttcgtccttgacctctgaaagcaataattg

SEQ ID NO: 1386 - DNA, 376 bp, Glycine max
  Clone ID: ASG3244V4R-02-Q1-E1-F4
agaccattaatccttattttgcatataaatctcttaatatatagtaagtggatggattcggttacattcatagatagatgaattgaatggataccaatggattcatgtacatcgttttagcaccccctaagtatgtacatgtacataacgttacagctgaaagtaaagagtaaaaatgcacggcatttcaacaaagccttcttaatattcattcatacataaaaaagcatacaaattattatacttgttcctggtgtagtgtgggtggtcctggtgctattgcaaactgtaaacctctagctgaccagattgtagaacaaaagcaacttgggttgccgctagtgctgcagcctcttgtctttgtcgccgacgctgc

SEQ ID NO: 1387 - DNA, 374 bp, Glycine max
  Clone ID: ASG3244V4R-02-Q1-E1-F5
tttttttttttttttttttttttttttttttttttttttttttttttttttttttttttttttttttttttttttttttttttttttttttttttttttttttttatttttttttttttttttatttttttttttaaaaaaaaaaaaaaaaaaaaaaaaaaaaaaaaaagcaaaaaaaaaaaaaaaaaaaaaaaaaaaaaaaaaaaaaaaaaaaaaaaaaaaaaaaaaaaaaaaatctttaaaaaaaaaaaccccaaaaaaaagacccaaacacattaaaaaaaaaaattttaaaaaaaaaaaaattgggggcaaatggcggaaaaaaaaaccaaaaaaaaaaaagacccaaataaaggaaaaatgtggggaac

SEQ ID NO: 1388 - DNA, 359 bp, Glycine max
  Clone ID: ASG3244V4R-02-Q1-E1-F6
aaaaaagggttctcaagtataaaactgattaattatcaacataggaagaattcaacttacaaacgccctgacatcatgtatgtaattctgcagaataaaattttaataaaaaaatatgtagcacattttgataaattaactgagcttgaaatgccccaagtacatttgagagaagggggtgctactatctatatatcaagaccggctaatatggccgatatctgcgcccatggccaccatcattgttgtgccttcccttacttgaactcccgacattcctgttgccactcccactgccaccaccgcccctgccacctctatgatgtgagggtggggcttgtggctgcattcctggttgt

SEQ ID NO: 1389 - DNA, 356 bp, Glycine max
  Clone ID: ASG3244V4R-02-Q1-E1-F7
caactcaacgaggggaataaatttcattaatattataagttcatacacggcaacaatttagttgatgtctttttaacaaaatccaaatacagcagtcttctaatgtaggattctctattataatatataagatgagcacagattgccacaagctgcagcttcttgccttagtggacaactagctgctcatttaggatttcacggtagttgaatcttcttcctgctgctttgcaggaactggaaggtggcctttctcctgcaggctcttcactgtttcatatagacactgactcactggagtgaattccaatcccaaatctttcagcttttgatttgaaaaagtgtagggttttgct

SEQ ID NO: 1390 - DNA, 365 bp, Glycine max
  Clone ID: ASG3244V4R-02-Q1-E1-F8
gaaagaaaatgatatgtacaaacatgaaaaccacatcagctaacaactgacaagatgaactacatgcatgaagcatgatagactataaactgcatacaccacttccataaccattcacactccaattattcttacaatcacacacacttgacagctacataatagcatcatcaaaaagagacctagaccaccaatattattatgaattacaaagcagaaactagaattgcttatcatcattcctccctccctcaacatgtaaaacaaagtaacctttaccacaaaatgctatatatccaaacgaagggggccctagcaactcataatgaaacactaagctcactttgccaaacatcaagagactt

SEQ ID NO: 1391 - DNA, 366 bp, Glycine max
  Clone ID: ASG3244V4R-02-Q1-E1-G1
gaaaatggaaagctttctttgcaattgaagtaaaaatgtaatgaacatcaagtcaaaataatttatacacttgagatggaacaaaatactaatagtattttgattgaggggaaaacaattccaaacaaaattacaagtaacttaatttaaaaacttgaacatgaatttctgaaactcttaaacttcaattaaatttcttttttggttatgtgggaaagcaagtaggtgccctctataagctgtgcttgttttttctggcacttttagtcatttctttggtgatggcatgactaagaaccccaatagggcaaaagaacaagcacagagaaactgaatgccgagtctctatctgattctctaatccat

SEQ ID NO: 1392 - DNA, 381 bp, Glycine max
  unsure (1)..(381): unsure at all n locations
  Clone ID: ASG3244V4R-02-Q1-E1-G2
ttaaaatattgttacaaaaataatttttcaagcattaaaaacttgaattatcgtgtatacttaaagagaataacttgccaataaaacatacacatatgatgactaaagacaagatatgtcatttaacaagacagaataattcctacaggtaaagtgcataacaattgagtataccatctaataatgaaaataacgcaaataacataatgcttaaagcaacgttcatatcagaagggaaaaatagtttgaatcccatccaacaaaaatcatgcgattaaaatccaattaaaaaagcataaagtaaaataagtttttaaaacaggtatctggaggaaagcaactacatttagtccacttcctcaatcttggggccnagcacac

SEQ ID NO: 1393 - DNA, 374 bp, Glycine max
  unsure (1)..(374): unsure at all n locations
  Clone ID: ASG3244V4R-02-Q1-E1-G3
aaaaaagggttctcaagtataaaactgattaattatcaacataggaagaattcaacttacaaacgccctgacatcatgtatgtaattctgcagaataaaattttaataaaaaaatatgtagcacattttgataaattaactgagcttgaaatgccccaagtacatttgagagaagggggtgctactatctatatatcaagaccggctaatatggccgatatctgcgcccatggccaccatcattgttgtgccttcccttacttgaactcccgacattcctgttgccactcncactgccaccaccgcccctgccacctctatgatgtgagggtggggcttgtggctgcattcctggttgttgcaagacatatcca

SEQ ID NO: 1394 - DNA, 379 bp, Glycine max
  Clone ID: ASG3244V4R-02-Q1-E1-G4
ttaaaagaaggggagagatctgcaacctttgtggcagaccccaccctgcattattacacctttctttctctttccttacagatctacattacattacattacatacacttccttgctgcttttgctttctgtttgtttccctgacatttatatatgcatatatatccctcatctatatatacccgatatttatattatgtataattgctacaccaacatgcatttggatccatggacacggaccaccacaataattaagaaaaaataatagtaataattgaagaaaaaacaagaaaaatgatccaaggtaggtatttgaattatttgtttttctttgtttcttgtaaaaacaaaaacaagggcatgtggtgtgaggata

SEQ ID NO: 1395 - DNA, 371 bp, Glycine max
  Clone ID: ASG3244V4R-02-Q1-E1-G5
gaagcaaatttgaattatatacgggaataaggaatacatgatcgcatttaaacaaactttacaggcataaaagtatatcaccatgcaaacagacattaattgtttcatgtacaaatgaagcccgtccagataatgatccctccttcgcccagtcaaagcagcaaaggttttatccaattccaaaaaccaaataaagaagacaggaaattactgtaagcttttaatgaaatagcccaaacccagacttgaaacaaaataataaagcaaatgaagaaaagaagaaccccgtatgaaagaattaagtccctcgccccacccaccaatgttgttgtggttgtaatgatgaatataacagtaacagtaacatcctt

SEQ ID NO: 1396 - DNA, 288 bp, Glycine max
  Clone ID: ASG3244V4R-02-Q1-E1-G6
ggtactgattcaatgaccattaaaaaaaaactgttaaatatcgtatagactctgaagtccatataactgaatttttattgtgtccacaagtttccttttggcaagatatttgatgtataactgaagtaccctcgaggagttatcaagaaagaacaggccttgctcttttttcaacattaaactgtacgtccacaaggcctgtaataccagcagtaattgtttgaccctctttcacagggccaacacccgggggagtaccagttagtatgacatctccttcaaacaatg

SEQ ID NO: 1397 - DNA, 390 bp, Glycine max
  Clone ID: ASG3244V4R-02-Q1-E1-G7
ttttaaaacaacacgatatgacaattaatcatttcatatttcacacattcataacaaacgtaggtgggatattagagtactattattaatgggacacaattgagttcaacacaaaccgaacttattttcaagggacattattacagacccattaaacatcaaagttcttcaaatgttttgggaacacatccaacattacacaacgagcttaaaaccccccacggagacggaggacaaagtgaagggttgattccttctggatgttgtagtcagcgagggtccttccatcctcgagctgcttgccagcaaaaatcagcctctgctggtccggtgggatgccttccttgtcctgaatcttgggcttcacattgtcaatggtgtcagagctct

SEQ ID NO: 1398 - DNA, 364 bp, Glycine max
  Clone ID: ASG3244V4R-02-Q1-E1-G8
tttgaagctaattttttcaaaaaccttgatgaaatcataaccagttcagcaaactataattttcatgttgaatgtctgacaacaatcgaaagtaaattgacacgcataattctattttacattagctgacatatgcaatgcagaagctataataaattaaagataagatgatgctatcattcatatcagcagagaatataaatgtgatgagtttgcacaatcattcttatagttgccatcactgcaaccaaattcatgccttcaaagcttcccatgcatataaggatgaacttaatctgctgtccaactctgctccacaatttccctcactcttcgattgtactcacgcttgttctcactaaac

SEQ ID NO: 1399 - DNA, 396 bp, Glycine max
  unsure (1)..(396): unsure at all n locations
  Clone ID: ASG3244V4R-02-Q1-E1-H1
ttttaagaaattgtaattatttccatggaaagatttaaaaaaaaaattgtaatgacttatgcatcaacttagttgatggttgaatcaatgttacatatttcaattcctacatcaacgttcctgtggatgacagcatctctctcctaggaaagttatttcttgcatgaaagataaatgcccgatataatggccacgccggctacggcaacaccaatagacgtaacgattcttgttgcagagacagctggtttgggagatggaactgtcattagattcctcatcaagacaggttgcntccaatgcttccttattccctgtagatggccctttccaacaacagcaacaactgagctattctcactcgccacttttaataatgtggaggacatgtactga

SEQ ID NO: 1400 - DNA, 393 bp, Glycine max
  Clone ID: ASG3244V4R-02-Q1-E1-H2
aacaaaaaatatccatagtataaattaatgacaattatttagaacacatggcttaaggtcaaacagaatgatacaacttacagctgatctggaaagacaacaaagcaatgaatcgagagatccctaaaaacacagaaaaaacgtcttccctagtatataaagtgcctcaacatcatgtttagcagcgcatggtctctacattaaaattacatagcagcacagattgccctatatataaattcctacttctccaggaacatacaccaaggcattggggcttatgtgggctatattgcctactggctaacgaaaccaaaaggaggaaaatttgcgattttatataaaaccaaccagtaaaatatggcagaacacttgggcaagaacaccccttct

SEQ ID NO: 1401 - DNA, 349 bp, Glycine max
  Clone ID: ASG3244V4R-02-Q1-E1-H3
tcatgcatcgaaaccgataactggattgattaaatgtcatttttgattgaaatccaaatatgatagaagaaggatactcttccgtcttcacataacaactttaataaagttttgatagacacaaaatatgcaatgtggaaccaaaataggaatttagtaatggtttgtttcactgggaatttttgttaggtccataccgtcgaaccctctcatcaatccactctctcatgtcccccaacacgagattcgcagactcatcgggctctccctgaatcaaagagtgatacattccatcgtagagcttcaacgtcttatcctcactggaacccttctcatacagcagcttgga

SEQ ID NO: 1402 - DNA, 215 bp, Glycine max
  Clone ID: ASG3244V4R-02-Q1-E1-H4
caaaattaaaccacccaagaaaggttccccaggggaaaaataggccaaaagttatgggacctaaaataccagtaaaaacacaccaaataaaaaagcggaaatgcaaaaagcacatgaaatactatatgaaaaagacctatttccacaaagaaaaatagaaccacaaatgcctaaagcaacagtttcaaaaacagtatcggaaggcttgttttcag

SEQ ID NO: 1403 - DNA, 373 bp, Glycine max
  Clone ID: ASG3244V4R-02-Q1-E1-H5
gaaaaaaaaaaattaaaacattcatactctacacaaactattaactgagtttttccttcagcaattacttagttctttcaataaagaaatttcatgctccagtatacatctggaaaccttccatgatatgccaaccgatatctgtatatcaacctttacttcatagtgcaatggcaggcccagttacatcatttatgacagggcaaaatatgtctccaccaatggcactaagaggccaattctgacacactattgacacctatagaatttgtcatctttttggtaatcagatccttcaattcgatctctccaggaaaccttccctccttcaatttagagaaaaccagttcaccattgaagtaaatttcgaaag

SEQ ID NO: 1404 - DNA, 322 bp, Glycine max
  Clone ID: ASG3244V4R-02-Q1-E1-H6
gccaaaagtaaaccaagtccactattttagaggtccttacacttactgatggcaatgcttcataagatcccctgccaaaggggttttacaatgggaaggattacacaggaaagcatacagaaaatgatttgatattgagacaaaatgattagtgaaggaacctaggcttaatcagacaaaaccaagccaaatggtatggttaaactttaatagactgcatatataattttgctatatacaaatggcttggaacctgaaaatcaaaagtaaaagataactagattgaaaagatctacacatacatacatatatagattgcaaa

SEQ ID NO: 1405 - DNA, 352 bp, Glycine max
  Clone ID: ASG3244V4R-02-Q1-E1-H7
attcataaattctgagatgcaaataaaattgaattacatcaacaacaataataataataataacatacttggatgaacatcaaagcatagacaacacctagaaggctagaagtcattctcccaggccaagcaagaaaataataataaaaaaaaaaaaacccagctgaccaaggtagagagatttacatcatattgaccaaatagccaataaccaaatgctaaaaaaaaaaaaaatcgaaatcctacaagaagcactgcaatcttcaaaaactcaattgcagcagccacctagcaagactaacctaaattattattattattagccacaagactagacataaaaacaaagacg

SEQ ID NO: 1406 - DNA, 321 bp, Glycine max
  Clone ID: ASG3244V4R-02-Q1-E1-H8
gacagtaagaggcattatcatattgaattgacggtgacaatgaactcaaaattgaagcagttaataaatgtgtacaaaacaatgaaatgtttgtatttgtaaatgaccttgttcctataatttacctaggcctagttctataccacctgaagaaactaaatatgatttccttttctttcttctgtgtatatcacttaccaccaatgggaaccccccccaaaaaaaaaagaagaaaaaatcaacctcaagaattgccatgtttatagttgttttcctatacacaactttcaacccccaacaagatgttaaacatcagcacac

SEQ ID NO: 1407 - DNA, 325 bp, Glycine max
  Clone ID: V4R-01-Q1-B1-A1
ggcagttccagcagagaggaaccacaaccatttctcagttttgatcgtactctttcttttcctcgtccacaatgctctctgcattaggttcccggatcggatcgcccaacccgccctcgacccgctcgaccaacaccgcctgcgggtcgccgtcttcgccctcggaagcttctggagatccgaagcggtgttcggttgtttaccgggcgttgttcgcaccaccgtcggctacgccggcggatccaagtccaaccccgaataccgaagcctcggtgaccacgccgagtccgttaaggttgagtatgatccgcagctgattagcttt

SEQ ID NO: 1408 - DNA, 281 bp, Glycine max
  Clone ID: V4R-01-Q1-B1-A10
aagcgatagcagtgtggaagtacttgcagaactttgtttcccaacctccattgcctccgcttctacctcgctaccatgatcattcctgagaagaaccgcaaggagatctgcaaatacctcttccaagagggagtttgctttgcgagagaatgacttcaatttggcgaagcatcctgagattgacgtgccgaatctgcaggtgattaagctgatgcacagtttcaagtctcgcgagtatgtgagggagacttttgcgtggatgcactattactggttcctca

SEQ ID NO: 1409 - DNA, 344 bp, Glycine max
  Clone ID: V4R-01-Q1-B1-A11
attcggtccaagtgcccaccttggaccggttctttccctaaccttcacctcataaggggatctgtggtcgggttcaaaaggaggaggtataaaaatatggccttgggaggctgttgaaaaatctattcatcttactaaggaggaaaggcacagtgctgtcatattcgtggagaggtcctatgttgacttaaggagccagctatctacaaatggcttcagtaacatgctaacttcagatgtaaagtacttagtatctgataatttgagagcataggtgtggagtgctggctatttttcatttgctttgtgggatgcccgtaaaagagaactactgaaaattttca

SEQ ID NO: 1410 - DNA, 304 bp, Glycine max
  Clone ID: V4R-01-Q1-B1-A12
gcacgtctactctagatgatcccctcggggaattgcaattccacattttcatgatataacgaggcaaaaatgttcatatatgaattggaattatttgttttcttattaggcctatcctgaagccaaaggaaatgagatcggaattcctcggggaattccagttccacattttcaagaaataacgacgcaataatgttcatacatgaattggaattatttgttttcttattaggccgatcctgaagccacaggaaatgagatcggaattcatcggggaattccaattccacattttcaagaaata

SEQ ID NO: 1411 - DNA, 469 bp, Glycine max
  unsure (1)..(469): unsure at all n locations
  Clone ID: V4R-01-Q1-B1-A2
cttgcttgcaataactccacgttaaaatggggtacggtcacagttttaaacataagcgtcccagctcatcaagtggacgtattgcaattggtttcatggttttgtaatagcgaagattactgggagacttggttgacaactggtatatccagaatttcaaggaaggaaaacaagttcataactgtaggttgcgacagttacggcaatctcaatagcgtttataatgacaaaacatatacaacaaggtgcttaacaagatgttatggcaatgctttggtgattgatgatggaacatgctcaggtatanggtgttgccaggttgatattcctcctcgaatgactaatatcactattaaagcatttgccttcagaacctcaacgagaaatatcagcataaataatgcctctgtcatctccaattcaacctgcaattaatcctttggtgtcaaaaatggcttttaaaattttt

SEQ ID NO: 1412 - DNA, 453 bp, Glycine max
  Clone ID: V4R-01-Q1-B1-A3
tgaattttgtgacagcatataagagcgccaacgtcgagtgcaaacgtacatgcactcggaagtcagctcgagattcggatcaagctaatccttagaaagtagtcacaacactcattcacatgcgatgccaatttccagttgaaacttgaaagagaaggatttgcgaaaacagtgtattattttgcgttgctaaaaccctgtaacccgacttccgtttgggtttttcactgtgcctatggcggcggcagcggtggcagaggtgaggaaggccccacggccgggcaagggcgggtacgaagcgcacggcctgagcgaggaagaggcgcgagtgcgcgccatcgcggagatcgtcagctccatggtggacctctctcacaaaggccataacgtggacctcaacgcgctcaagtccgcagcgtgccgcaagtacgggctctcacgcgcggccaagct

SEQ ID NO: 1413 - DNA, 447 bp, Glycine max
  Clone ID: V4R-01-Q1-B1-A4
cctccttcttgttcttcatcatcttcttcgttccctcctagtttcccacgttttcacttgtcgggagcaaaacccatttctctttcttgcagaggaacacgattgtgctccttgaaagggtctaaaactctttggggtagaaaaagttttgtgcttggggctggaaacatgaccatggcagaggttgattctcatgaagagggggagaacgagggtgctttggttggctctgagaatgagaacaattcaaggcctcggagaattgctctctttgtcgagccttctccctttgcatatgtctcaggctacaaaaaccggtttcagaactttattagatgcctacgtgaaatgggtgatgaggtgatggtcgtgacaacacatgaaggagttgcacaggaattttatggaaccaaattaattggattttggaactttccctggcctttg

SEQ ID NO: 1414 - DNA, 416 bp, Glycine max
  Clone ID: V4R-01-Q1-B1-A5
attccgctcgagcttaataacatcaagtatttttttctatttaaggctgttttagtgttctatgctgaaaataactaccaaaaccaggatccctcgagtgaatgggtctaactctatttaaatttcgttctagattcctcgtcgaacttagtctaaacaagttgcattaagaatacaacatgatataaactaaatccctgcactctgtgtccagacatacagttctctagcctgctctatccagttctaaggatttaaaacactttccaatgccataaattctaactttacacataaatgagtgatcaagccacaaacatgcaagaattaagtgcagatagaagcaataaacacataaaaacaactttaaatagatagtaaaagattttacatcaaagtttagcagaaaccctcaa

SEQ ID NO: 1415 - DNA, 439 bp, Glycine max
  Clone ID: V4R-01-Q1-B1-A6
tattcctttatcctccttgcttattaatactacgccgactcctcataagttttttaatctgagggcagatcaagctatcacgtatggaaattccaatttcgctctcaattatgttactcttactacgtgtaacttcctgcatttgctcttccccaattcaagatcctgaactagtggttgaagatgtacaagagagaattaatgcctcaatggatgaacttagcatttctttcttgtggaacggtgaaacccattgatgattgttggagatgtgaccccaattgggagaagaatcggaagcgtctagcagattgttccattgagtatggtaagcatgccgttgggggaagggatggtaaaatatatgtggtgactgaacccggtgattaacctgtgaaccccaagccaagaacactaagataatgtggtgatcaagaag

SEQ ID NO: 1416 - DNA, 377 bp, Glycine max
  Clone ID: V4R-01-Q1-B1-A7
taaagagtttccatattacttgcaatagctactctaccatacacatacactcctcctcacgtttgagtttcagctacattatctaaagcacacttggcatttacatttagcgacagccacaaatatatagtaacatcatgggtttgaagaaccgtggcgttggtcatagagcatggagcctcctgcgggcgtcattgttgtgggcacgtaaaggtggcttgttaaggcgcagggttgccatggagctgcgtctggtaccaaagtacttgaagcgactcggccacactgcgccgccgccaagccacattcactactttgagcgcgagctctcgtttcaacaagacccccatattcaaggtcaagatgtaccgtcaaac

SEQ ID NO: 1417 - DNA, 359 bp, Glycine max
  unsure (1)..(359): unsure at all n locations
  Clone ID: V4R-01-Q1-B1-A8
gaccttcagttggaatctcagctggtgatgagatttgggcagctcgttacatcttggagaggatcactgagattgctggtgtggtggtttcctttgaccccaagccaattaagggtgattggaatggtgctggtgctcacacaaactacagcaccaagtccatgagagaagatggtggctatgaagtgatcaaagcagcaattgacaagttggggaagaagcacaaggagcacattgctgcttatggagaacgcaacgaacgtcgtttgacaggacgccacgaaaccgctgacatcaacaccttcttatggggagttgcaaaccgtggagcttctgttanggttgggaaaaacacagac

SEQ ID NO: 1418 - DNA, 335 bp, Glycine max
  Clone ID: V4R-01-Q1-B1-A9
ccggcccttcctttgaaaacggtttcaaaccctgactcgccgagtcaactcggcgcgccgccgcagcagcgtcgtttccgcgtgggtcctagacgaccccgcgttcggctcccacgtaaacaacgggtcgtcggaactctacaagcaagtgaagcacgcgcgcgaggttgggcggagtctctgggaagacctcgaatctggaaagccgctaacccgaaccgttgccgctcgggcggcccataaccggtcaggttcgtgtcgcggttcggtctcgctttccggtccggacgttgttgacgtctcgggcgtcatgccgttgccgtgtgggctcacgt

SEQ ID NO: 1419 - DNA, 372 bp, Glycine max
  Clone ID: V4R-01-Q1-B1-B1
gggtgtcaaacccatgggctctcagtcatataattattctcgcttgtctgaacaaaatagtggcatgtttggtagattccgttcaagacacaatagggcttcgtctctaaatgaggatattttaggttcttgtacagttgatctgtgcacatccactataaagatggatgcagacgatacagatctacgtctttgcttccgaataatttctccctcaaaatcatacacactacaggctgaaaatgaagctgataggatggactgggtaaacaaaattactggagctatcacatcgctttttaattctcagtttcttcaacagcctcaatttggtagagtgcattcccagaatagaaactcagcaactggtgc

SEQ ID NO: 1420 - DNA, 295 bp, Glycine max
  Clone ID: V4R-01-Q1-B1-B10
tttggttggcaagtgtgttcaaaatttgaccaaactcactctcactccccaaattaaactagcagcagcagcaacaacaacaacaacaacaaaccttctctttaatttgggttccacaatcaaaaccaatcttagccaccatcaagactttggcatggagccttactccattgatggtgtttcttcacaaactaactccaaattctacgatgatgatggccatgttaaacgaacagggaccgtttggacaacaagctcgcacataataacagcagtggtgggttctggggtgctg

SEQ ID NO: 1421 - DNA, 262 bp, Glycine max
  Clone ID: V4R-01-Q1-B1-B11
gttaactgcaccaagttgaactggatctccctctccaacaacaggctcagcggcgagattccgccgtggattgggaagctttctaatctcgccatactcaagctcagcaataactctttctccggccggattccgccggagctcggcgactgtacgagtttaatatggttggatctgaatacaaatatgctcaccgggcccattccgccggagctgttcaagcagtcggggaagatcgccgtgaatttcatcagtgggaaga

SEQ ID NO: 1422 - DNA, 400 bp, Glycine max
  Clone ID: V4R-01-Q1-B1-B12
cactcacatatcgaatccctgtaactccatggcaccaccgaacctccctcccacttcagagccaagttcctccgccgtacagaaagtgaaaagtaaccttgtcttccgttcaacctggcccgaactcaacggcgccatgggtgacctatgcacatacatacccattggcttgtccctaacactagccagggacctcaacctcggcaccacattgatttttactggcatgtacaacatcatcaccggcgccatctacggcgtccccatgcccgtccagcccatgaagtccatcgccggcgtcgccctcgccgaacccatcttctccataccggagatcaggggctccgggaatctcactggagcaaccctgttgggtctacgtgtcactgggctcatgcag

SEQ ID NO: 1423 - DNA, 433 bp, Glycine max
  Clone ID: V4R-01-Q1-B1-B2
ttagcatatatccataccgccctgcgagtttgccatagggatgtaaagcctcaaaatcttttggttcatcctcttactcaccaagttaagctatgtgattttgggagtgccaaagttctggtcaagggtgaatcaaacatttcatacatatgttcacgttactatcgggctccagaactaatatttggtgcaactgaatacacaccttctattgatatctggtcagctggttgtgttcttgctgaacttcttctaggacagccattgtttcctggagaaaatcaggtggaccaacttgtggaaattattaaggttcttggtactccgactcgagaggaaatccgttgcatgaacccaaattatacagattttagattccctcagattaaagctcatccttggcacaacgttttccacaagcgaatgcctcctg

SEQ ID NO: 1424 - DNA, 260 bp, Glycine max
  Clone ID: V4R-01-Q1-B1-B3
gtttggttttcacttttgttcatcgtttgcgagacacacaggagagacgagatggcgacgacggtggtggcggaacataatccgaagacgaatattgtgtgcacgctggggcccgcatcgcgctctgtcccaatgatcgacaagcttctgcgggcgggcatgaacgtggctcgcttcaacttctcccatgggtcccacgagtaccaccaggtaaaccgcgacaatctccgcgccgccatggagaacaccggtattctctc

SEQ ID NO: 1425 - DNA, 444 bp, Glycine max
  Clone ID: V4R-01-Q1-B1-B4
ggtattttgataaactggcaatttccagggccacaaattgaggctgtgaccaatgacaacttgattatcaatgtatacaacagcttggacgaacctttcctcttatcttggaatggagtgctgcagaggagaaactcgtggcaggatggagtgtatggtaccaattgtccaattctaccagggcataacttcacttatgttcttcaagtgaaggatcagatacgtagctacttctactacccttcccttgcttttcacaaggcagcaggaggttatggtggattcaaaattgctagtcgccccgggattccagtgccttttcctactccagcaggagatttcaccatattggcaggagactggtacaagagaaatcacacagatttgagggcaattttggatggtggaagtgaccttcccttccctgatgggattatcatcaat

SEQ ID NO: 1426 - DNA, 373 bp, Glycine max
  Clone ID: V4R-01-Q1-B1-B5
gtgtttataaaacgacagtaggagcctggtctggtcggtgtggcactcaaacattgtttgttgtaggaagaggaatcttgagaaatggcaggggacagcaagagcaagattctgttcatcggagggactggttacatcggaaaattcatcgtggaagccagcgccaaagctggccacccaactttccttttggtgagggagtccactctctccaaccccgcaaaatcacccctcatcgacaatttcaaaggcctcggtgtcaatcttgttttaggagatctatacgatcaccaaagtttggtgagtgctataaagcaggtcgatgtggtaatttctactgtaggacacctgcagctagctgattaagataaga

SEQ ID NO: 1427 - DNA, 353 bp, Glycine max
  Clone ID: V4R-01-Q1-B1-B6
tttctctttcttcgcacttttccggcacgtcgcaatcgccggcaactcacttggcttcgccggagtgcaatcctaccggcgaacggccgttcgcaagagtttttttaatttttattttgtgcatgttgaaacgggggcgtttggttttggtggtgatgaatcgggggaaagtggggtatggatgtagattggttgatcgggggataaggggagaatggttttgggggtggcggtgacaagttccgtagcgacatacgcatgtgctgcggaggtggtggggctgatagtgacgagacggaagaactgtaacaaactggcgaatgtgatgacggaactgtaggaagggtgtggca

SEQ ID NO: 1428 - DNA, 446 bp, Glycine max
  Clone ID: V4R-01-Q1-B1-B7
catccgtaagccaagaaccacatgatgataatattgccaagtgcaatgcagaatgcttgacagtgaatgtcccacagtcgtctagttcttcaggtttagacacagaaagtattatgtcagaagataattgtagcagttcaaatttggctttaagggaagttttgcttgcatatgttactaaaggggatgatgtacaagttttgggttctttgagtgttcttgccactctactgcaaactaaagaacttgatgaatcaatgctagatacgcttggaattcttccacaacgcacacagcacaagaaacagttattgcaagctttggttggtgaggcgtcaggtgaagagcaacttttttcttctgaaaattacttgataaaggatggcattggatatgaacctggtgttcaacgtgaaaagattaaggagcagttccggttaaccttt

SEQ ID NO: 1429 - DNA, 249 bp, Glycine max
  Clone ID: V4R-01-Q1-B1-B8
gcattggcaagcaatctggtttctctctcctctctctctctctgctctgagtcacaggttgtgaaacgttgttggcacttggcagataattagtgcatccaatgagtcatctgcaaaaattgtgtcccggaatgaacatcaagtgattcagtgcgattggaaagaaccttcccaattacaaagattgactacttgttaatcccaatgaattttcttggccgagtgaatacttcttttctagaatcaaac

SEQ ID NO: 1430 - DNA, 302 bp, Glycine max
  Clone ID: V4R-01-Q1-B1-B9
ccataccaagatgctcctccgaagccactgttgctacctcggcataatcgccgggctagcagtgttcctcgcaacgacgtcgttcgccgacgcgcaatcctgcaacggcatcctcgtctcatacgcctacaccggcggcctgcggttgccgcccaacgtctccgactcggctaagcagccgtaccggttcgagtcgacggtgacggttctcaacaacggcctcgacgagctcaagtcgtggaaggtcttcgttgggttcgaccacgacgagtttgttgtctccgcctccaatgccgtgctcg

SEQ ID NO: 1431 - DNA, 353 bp, Glycine max
  Clone ID: V4R-01-Q1-B1-C1
gagactgcaatgcatgaagagctgtataacaggtttgattacgatggaatatttggaactgcattgaatcggttctgtgttcaggctgctgttggtcatccacttactgtatatggtaaaggaggccagactaggggcttccttgacataagagatacagttcaatgtgtcgagcttgccatcgcaaaccctgcaaagcctggggagttccgagtcttcaaccaattcactgagcagttttcagtgaatcaacttgccaaccttgttacaaaagcgggtgagaagctgggcattgaggtgaaaactatcaatgttcctaacccgaagagtcgaggcagaagaacattactaca

SEQ ID NO: 1432 - DNA, 300 bp, Glycine max
  Clone ID: V4R-01-Q1-B1-C10
cggacgagagaaggatgaaattcacttgggaaagaaggagggacatatccatatgtgtggctcggggacttgactttcttcatgagcagcttaagcctcatatcgtatatagagacatcaaagcagcagacatacttcttgatagtaatttcataccaaaggtttctgattttggtttggcaaaattgctgagagatgaaacatctcacattagcactcgggttgcagggacattgggttatctagctccagaatatgcaaattctggccaggtttcgcgaaaatcagatgtttatagct

SEQ ID NO: 1433 - DNA, 288 bp, Glycine max
  Clone ID: V4R-01-Q1-B1-C11
tacaatctcagctcatagcattcttcttcttccaacgagaatcagtctttgtgttccaaatggctcgtacgaagcaaacagcaagaaagtccaccggaggaaaagctccaaggaagcagctcgccaccaaggcagcacgtaagtccgctccggcgacgggcggcgtgaagaagccccaccgtttcaggccggggacagtggctctgagggagattcggaagtaccagacgagcacggagcttctcagaaggaagcttcctttccacaggctcgtaagggaaatcgctc

SEQ ID NO: 1434 - DNA, 358 bp, Glycine max
  Clone ID: V4R-01-Q1-B1-C12
ttttccgtttcttgcgattcgacgatggccgatcaaaagctttcagaaccggcgcttaaacgtgagcagcttgatgaattcgtgagtagtctatattttgaacaacgaattcttgaactccgacttcttcaagacctcgagaacaatgatgaatgtaggaaaaatgggagcctgaaaaggttaaatgaccagagtgatgtctgtggatttagaagttgcttcaaaaatcattatgattcgcttccgaatcagaggtgcttgaggaatcgagaagaagtgattcaggagacgatggaaatggagttgggaaatatgaaggaactgggcaacctcaagggcaagaaaacatattccttta

SEQ ID NO: 1435 - DNA, 387 bp, Glycine max
  unsure (1)..(387): unsure at all n locations
  Clone ID: V4R-01-Q1-B1-C2
caattttctagggtttatacaattttcgatggcttcttcagatgttgagtaccgttgctttgtcggtgggctcgcttgggccactgacgaccaagctctcgagagagccttctctcagtacggcgaaatcgttgaaacgaagattatcaacgatcgtgagactggaagatccaggggttttggatttgtgaccttcgcctcggagcagtccatgaaagacgccatcgaagggatgaacggccaaaaccttgacggccgtaacatcactgttaacgaagctcagtcccgtggtggcggtggcggcggaggcngtggaaggtgtggatatggtggtggtcgcggtggtggatatggtggtggtggtcgcggtggtggaaggggatacaa

SEQ ID NO: 1436 - DNA, 324 bp, Glycine max
  Clone ID: V4R-01-Q1-B1-C3
cggtgacttactcactcgctccttgcggacactatttaaattaaaaacctcttccttccacttctccatcggcttcgtcttctttctcgttcttactttgacggtttctagagagagaaagtgatggccggagttaatccaaacggcgtcgccgattttgcggcggttccgatgcatggcggacagttcattcagtacaacatatttggaaacctcttcgaggttacgacgaagtaccgtcctccgatcatgcctatcggacgcggcgcgtacgggaacgtttgctcactgttgaatactgagacgatcgagctggttgctgtg

SEQ ID NO: 1437 - DNA, 440 bp, Glycine max
  Clone ID: V4R-01-Q1-B1-C4
cgactaggttacccaccgccggattcttacggaaaggacgcgtaccctccgccagggtacccgccgcaaggaggataccctccgcaggcgtatccagcacaggggtaccctccaccctacgcgcctcctcagtacgctcagcctccgccgcaacaacaccagaattcatctggcccacgttgcttacaatgatggtaagtctctctctctctctctctctctgcatatttctgagtgaaggtgttcgtggcaactcagatcgggattcactcgattgattgcggttgcgattacgggtgcaccatcatctatggtgcgcccgcccgcggctgatcattgattagctgtagttgcgttgtttcactgctgtcatctgacgcgacacgcgcgcacgatactcgaagtggatgtcatctttttttttcgccgggccccgccac

SEQ ID NO: 1438 - DNA, 399 bp, Glycine max
  Clone ID: V4R-01-Q1-B1-C5
ggagggaaaatccttctgaaagtattcgactgaaattcgggaggaaattttgtacaaccaacaattgttgagatttctccagatgctcctgtagttaaagaagaattgtttggtccagttctgtatgttatgaaatttcagactctagaagaagcaattgccttgaacaattctgtacctcaaggattaagtagttcaatctttacccaaagacctggaactattttcaaatggatctggccacgaggtactgattgtggtatagtgaatgcaaacatacctacaaatggagctgaaattggtggtgcctttggtggagaaaacgcgacaggtggtggccgtgaagcgggaattgactcatggaagcaatacatgcggcgttctacatgtagcatcaat

SEQ ID NO: 1439 - DNA, 418 bp, Glycine max
  Clone ID: V4R-01-Q1-B1-C6
attccattcactctgtgtatttccctacctctcccttcaagatgcagatcttcgtcaagaccctcaccggcaagaccatcacccttgaggtggaaagctctgacaccatcgacaacgtcaaggccaagatccaggacaaggaaggaatccccccggaccatcaacgtctcattttcgccggaaagcaacttgaggacggccgtacccttgctgactagaacattcagaaggagagtactcttcatctcgtcctccgtctccgtggtggcatgcagatcttcgttaagacactcaccggcaagatcataaccctagaggttgaaagctccgacaccatcgataacgtcaaggccaagatccaggacaatgatggtatccccccggatcagcaacgtcgcatcttcgccggaaagcagct

SEQ ID NO: 1440 - DNA, 282 bp, Glycine max
  unsure (1)..(282): unsure at all n locations
  Clone ID: V4R-01-Q1-B1-C7
gtttctggctgctcaaaacttggttgcttaccagagggtttaaaggaaatcaagtctttggaggaacttgatgcaagtggaactgctattcaagagctaccttcatctgtcttttatttggaaaacctaaaaagtatctcatttgctgggtgcaaaaagccagtatctaactcagtaagtggatttcttctcncctttcagtgggtatttgggaatcaacaaactcctactgcatttagatgtacaccttctaaactgaatctaccctctttgatgagaata

SEQ ID NO: 1441 - DNA, 432 bp, Glycine max
  Clone ID: V4R-01-Q1-B1-C8
gccaactttaaggcttggagacaaggtaggactggctatcctttggttgatgcaggaatgagagaactatgggcaacaggatggatacacaacaaaataagagtcatagtttctagtttcgctgtgaaaatgttgctcataccatggagatggggaatgaaatatttctgggacacacttttggatgcagatcttgaaagtgatatcttgggctggcagtacatctctggctgcttgcctgatggccacaagcttgagcgcttggacgatcctgcgattcatggggctaaattcgatccagaaggtgagtatgtacgccaatggttgcctgagttggcaagaatgccagctgagtggattcatcacccttggaatgcaccccttactgtgctaagagcatcaggagttgagttaggtcaaaactatccgaaa

SEQ ID NO: 1442 - DNA, 327 bp, Glycine max
  unsure (1)..(327): unsure at all n locations
  Clone ID: V4R-01-Q1-B1-C9
acgttttccgcttcagttttctcgggaaaatcatggtgaaaggtccaggcctctactctgacattggcaagagagctcgcgatcttctgttcaaggattatcanaatgaccacaagttcaccatcaccacttacacttccaccggagtggaaatcacttcaactggagtcaggaaaggtgagatatatttggccgatgtcagcactaaggtgaagaacaagaacatcacaactgatgtcaaagtggacactaactcaaatctgcgtacaatcattactgtgggataacctggcccctggacccangaaaatttttagccttaatttt

SEQ ID NO: 1443 - DNA, 179 bp, Glycine max
  Clone ID: V4R-01-Q1-B1-D1
cttttaggagtcatgagcttgttctgaggtctgattagcttgctaattgggttggagaaatcattgagttaaaagagagaaatgggagctattgctggacaagagctgctgacatgggacaagatgcaaggagtgagcagtcgcgaagagaagattctggtgtcaataccactgacgcc

SEQ ID NO: 1444 - DNA, 290 bp, Glycine max
  Clone ID: V4R-01-Q1-B1-D10
cttaccgtcttcttcttcttcttcttcttcttcatcttcttcttcttcttcttcttcttcttcttctatatatatatatatatataccatgtatagccccattagcagtaatcgatcaccaatggagtcacacgtagacatcattctctctgcaatttttgttctactcctttcttcgttaacccatttcagcatcacggtagatgcaacagtagcacccgatgaaaacagcctccatttccaagtagcagactccacatgcgatggaacactctactctcgacatctgt

SEQ ID NO: 1445 - DNA, 52 bp, Glycine max
  Clone ID: V4R-01-Q1-B1-D11
aacattttccataagttgaataaaagatcatgtgacttgataatgtttattc

SEQ ID NO: 1446 - DNA, 288 bp, Glycine max
  Clone ID: V4R-01-Q1-B1-D12
gagacgcacaattgagggcttctctgagtctctctcgtcttgtgctgattccagcggagccgtcacacttcccctcttctacgtcgtcgttttgaaccccattgctccctctctccaattcaaggccaaaggtatgatgagagaaagtttcaagggcaagggtggatcttcttctcttcaatccatgaaggagaaggaaaaacacctggtggagaagattcaagggattttcaacagtcttcagtgtgcaagaaaggacggcaggggtaatgacattgtgatatttga

SEQ ID NO: 1447 - DNA, 462 bp, Glycine max
  Clone ID: V4R-01-Q1-B1-D2
caaacgatgggccctgacccactccgccggcaatgggaaagcccggagaagaccacctctctctgccctccgccgaggatccgcggcggaatgcggcggcggcgtctggatgcgccgtgggactccgatgcctcgtcgtcttgcttttctcggtcgcggttttcctctccgcactcttctggctacccccgttcgctcacttcgcagatcccaaggatctgtatttaaattcaaagtacaaagggaaagggattcagactaatccggagttcggttgggagaagccagtttctttgctagaagacaacatcttgcagctttctaatgacatttttgaagagataggagctccctctaccaaagtgatcatcttgtctctagattccttaccacggtcaaacacgacaaaagtggtgtttgcagtttgatctgatggtaaatattcagaaatgtctgcagctg

SEQ ID NO: 1448 - DNA, 331 bp, Glycine max
  Clone ID: V4R-01-Q1-B1-D3
ctcttacataccccaaatatgggttctaaagcccgttggcgccagagttgggctccacagcctttgacacccttaatggaacgccctggccctgaaatgcaagacgaatgaatcacgaaagagagctcttgggaagtcatacgggaatggttcaggactcagaagatctccccaggtggaatcttttcactatcagcaccattctatggaaccattcatgccatgacacaagatttgaggttgttgcttggtgtcctgggttgccccttggctcctagtccctcatcatatgattccactcttagtagtcacatcaaggacggcccatttg

SEQ ID NO: 1449 - DNA, 466 bp, Glycine max
  Clone ID: V4R-01-Q1-B1-D4
cgacggaggcaatgacctcaacggtcaccaaatcaagaagcagagcagccccagccctgaacggcaaccgcaccaacgccgcgccgctgccatcgcagctgccgcttccccggcgacgccgcagtctctcgaaaacgacaacgacggcgaggaggatttagatccttacggtggtttgttcgacgacgaacagaagaagattctcgagattaaagagcaactcgaagagcctgaccagtctgaagattctttggtggagttgctgcaaagcctatcggacatggatattacattccaagcgttgaaggaaactgacatcgggaggcacgtgaatcggttacggaaacatccttcaaacgacgtacggcgattggtgaagttgcttgtcaggaagtggaaggaaattgttgatgaatgggtgaagttgaatcctcagggaagaagcaacactctgatggctgatgga

SEQ ID NO: 1450 - DNA, 404 bp, Glycine max
  Clone ID: V4R-01-Q1-B1-D5
caaccctcaaccccaacaaagcaagagaagtagggtttttgtgcttggcaaaagaaagagaagagaagatggtgtcaggttcggggatctgcgcgaagcgcgtggtggtggacgcccggcaccacatgctgggtcggctcgcctcgattgtggcaaaggagctgctgaacggacaaaaagtggtggtcgtgcgatgcgaagagatttgcatctccggtggtctggtgaggcagaaaatgaagtacttgaggttcctccgcaaacgcatgaacaccaagccttcccacggccccatccactttcgcgcaacctccaagatcttctggcgcaacgttcgtggaatgataacacacaagacaaagcctggggaaaccgctctcgctcgtttgaaagtttatgaagga

SEQ ID NO: 1451 - DNA, 418 bp, Glycine max
  Clone ID: V4R-01-Q1-B1-D6
ggcgccctacggtccctaatggcgcgaacgaaggaagatcattgtgacagagatgctctcctcgagccgtgtacagcaactacatgatgttcgtgtgtccgaagttcaaaattcgatcgtagaactctacgacgtttggcgtagccaagagaacgagtctgactatgcatccgtggatttgaagcaatggtttgctcagcccatattcaacatggttctacgaatggtcgtctggaagcggtttctgagtgccacggcgaccgacgagaacgcagagatgtgtgtaaaggctgtggatgagttcatgcgtctggcgggcgtgttcaccgtcagagacgctattccttagttgagatggcttgattttggtggctatgagaaggccatgaaagaaactgccaaggaattggatgtgatg

SEQ ID NO: 1452 - DNA, 457 bp, Glycine max
  unsure (1)..(457): unsure at all n locations
  Clone ID: V4R-01-Q1-B1-D7
ctcgagccgctcgagccggaaagagaatccgaggcgaagagaagagaaaagttacgatggaggggaaggagcatgatgtgtcgctgggagcgaagaagttcccggagagacagccgattgggacggcggcgcagagccaagacgactgcaaggactaccaggagccggctccggtgccactggttgacccgacggagtttacgtcatggtccttttacagagcacggataccagagtttgtggccacgtgtctgtctctatacatcactgtcttaaccgtcatgggagtcgccggggctaagtctaagtgcagtaccgttgggattcaaggaatcgcttgggccttcggtggcatgatcttcgccctcgtttactgcaacgctggcatctcaaggggacacatcaacccggcggtgacatttgggctgtttttggcgangaagttgtccttgcccag

SEQ ID NO: 1453 - DNA, 380 bp, Glycine max
  Clone ID: V4R-01-Q1-B1-D8
ttcgcaatggcggttgttgctcaaacccctgacatcgccggcgagcggcagtccggccaagacgttcgcacccaaaacgttgtggcatgccaagccgttgccaacatcgtcaaaagctctttaggccccgttagcctcgaaaagatgctcgtcgacgacattggcgacgtcaccatcaccaacgacagcgccacgattctcaagatgctggaagtggagcatcctgctgccaaggttttgggtgaactcgccgagcttcaggattcaaaagtcagagactgcactacttctgtcgtcattgtatcagctgaacttctcaaaagggcaaatgaccttgtcaggaacaagattcatcctaactcgagtatcagtggatatag

SEQ ID NO: 1454 - DNA, 381 bp, Glycine max
  Clone ID: V4R-01-Q1-B1-D9
cctgggcggtttgatcgccatgttgttgttcccaatcctgatgtaaaaggaagacagcagattttggaatcacacatgtcaaaggttctgaaggctgatgatgttgatctaatgatcattgcccgagtaacacctgggttctctggtgctgaccttgcaaacttgattaacattgctgctatcaaggcggcaatggatggtgctaaagctgtgagcatggctgatttagagcatgcaagagacaagatccggatgggaagtgaacgcaggtcagctgtcatatctgaagagtcacggaagttgactgctttccacgagggtgggcatgcccttgtggccaaacatactgatggggccctccctgttcacaacgcaactata

SEQ ID NO: 1455 - DNA, 464 bp, Glycine max
  Clone ID: V4R-01-Q1-B1-E1
caatatattgatcatttcccagctggtgcaagccaagttgcctggtggattatggaaaatcgacgagagtactttgatcgttcaaaggatatattgcacagagtaaagatgttggtttttctttctgaatcacaatctaaacagtggcaaaaatggtgtgaagaggaaagcataaaactgagatccctccctgaaattgttgcattgtctgttaatgaagaactggcatttgtagctggtattccttcaacacttaacactccatcctttagtaccgagaaaatggttgagaaaaagcagttattgagggaatcagtccgaaaagaaatgggcctaactgataatgaaatgcttgtgatatctctaagcagcatcaaacctgggaaagggcagctattgcctcttgaatcagttagctcagtacttgaacaaggacagttgcaagatgataagaaaattaaaaa

SEQ ID NO: 1456 - DNA, 350 bp, Glycine max
  Clone ID: V4R-01-Q1-B1-E10
ggcgagcaggtactgggcagtgtctcttcccgtccccaactccgcatctcagctctggaaccaattccaggaacgaatctccaagcattccttcgacactcctctctacagattcaacatccccaacctccgcatcggaaccctaaactctctcctctccctcagcgatgacctcgccaagtccaacaatttcgtggaaggagttacgcacaagatcaggcgccagattgaggagctcgagagagtttccggcatcgacaccggcgccctcaccgtcgacggcgttcccgtcgattcctacttgaccaggtttgtttgggattaggcaaagttaccgaccatgtcgcctt

SEQ ID NO: 1457 - DNA, 283 bp, Glycine max
  Clone ID: V4R-01-Q1-B1-E11
cgacgactcttccccgccatccctcgcgcttcggagaattccctttctcggtctcagattatcgaccccaccaatgtcgcctccgccaagttcctctctcgctctttcactcgcaccttccaggccactaatccctccctccgctccgccgcaagctctcaggtggcgcagacggacttcacagatatggcatgggaggggattgttggtgctgttgatgcggcgcgagttagtatacaacaaattgtggagtctgagcacttaatgcaagctcttttggagc

SEQ ID NO: 1458 - DNA, 409 bp, Glycine max
  unsure (1)..(409): unsure at all n locations
  Clone ID: V4R-01-Q1-B1-E12
aatcatcttacttatttattctccgaaaatggttgatttacattggaaatcaaagatgccaagttccgacatgccttccaaaactctaaaactctctctctccgacaacaagtccttaccctctttgcaactacccttccgcaccacagatatctctcacgccgcaccttctgtttgcgccacttacgactactatctccgtcttcctcaactcagaaagctttggaactcctcagattttcctaattggaacaacgaaccaatcttaaaacctatcttgcaagctctcgaaatcaacttccgctttccctccattgttccctccgattcaagaccttactccaaccacagagaatggactcgcaggatanagtctcttatcacacatcaaattgaaatcattgccata

SEQ ID NO: 1459 - DNA, 458 bp, Glycine max
  Clone ID: V4R-01-Q1-B1-E2
cggctcgagtgatggcagagccgttcgctggagctgctgcgggagagttgttgaaaggggctcttgaaatcattcgcagcggttacgagttccgacccaccctcgaatgaatcagagaaaccttcgactctttatcctctcgagtacaaaagattaaacatttgaacaggaacctggacagctccacagaggagatagataagttggacgctcttgtgcgagatggtaaagatcttactgacatgtactccaaagttacttggtggagatttctctgcttcccttgttaccagtgcacgcttaaggccagtgacgatgctctgacgagacggacaactacgattgagccggttcacattacgctcggaatgatggagatcaatccggcatcaatatcagtcaccagactctgctcatgtcatggaaggagaatattggcggagcaatcgaagaaccag

SEQ ID NO: 1460 - DNA, 451 bp, Glycine max
  Clone ID: V4R-01-Q1-B1-E3
ctcaagacgaatttccaaaactaccccaaggggaaaccgttctccgtcatcctcggcgatcttcttggaagaggaatcttcaacgtcgacggcgaatcgtggaagttacaacgcaagatggcgagtttggagctcgggagcgtcgctattcgaacgaacgcgatggaattggtcaacgaggagatccacgcgcgtctgatcccattcataatgggatcagtcacgcacgacgaattaaacgactccgtctgcgttttggatttgcaagatatattacgaagattctcgttcgacaacatatgcaaattcgcgttcggtctcgaaccgggctgtctcctatcgaatcccccagttctaaatctcgccgacgcgtgtgacttggcctcgaagctttccggcggacgcgccatgaacgcgtcgccgtttacttggaaactaaaacgactcctca

SEQ ID NO: 1461 - DNA, 464 bp, Glycine max
  Clone ID: V4R-01-Q1-B1-E4
cacgagactcatacattgtgctgccaattatagtaactctctatttctctttccatctctcaagttctgaagaagaaacatgtgtggaggtgctatcatctcagacttcattggtgtgaagcgtggccgcaacctcgccgcgcaggaactatggtctgagcttgaccctttctctgacttccttggcttcgataccaccaattccaaaaaccaaccacccctgcagaaaattccagacaaaaaagtggtgtcatcatgtgagaagaagaagaaaagcgtggtgggtgcagaaaagaagaagagtgatagtgggcgagctcgtaaaaacgtgtacagaggaatcaggcaaaggccatggggcaagtgggccgcggagataagggacccacacaagggtgttcgtgtctggctcggcaccttccccaccgccgaagaagccgccaagcctacgacgacgccgccat

SEQ ID NO: 1462 - DNA, 414 bp, Glycine max
  Clone ID: V4R-01-Q1-B1-E5
gacaaatagaagaagctgcatttgcagagacgcattcgcgtttgtctgagagagagaattggaaggttgcgacgagtgatgatatacatattgtggcggtagtgaaatcgaggaaaaagaggtagcaatcgtgagttgcaatgagtagcgaaaagtctccttcatcagcttctgcttcagcttcttcttcgagtagctacgagttgagcaaaggcatcaatggcctcgacaaggttattcttcgcgacccacgtggtagctccgctgaggtgtacttgtacggtgctcacgtgacttcatggaagaatgaacaggccgaggaattgctttttctcagtagtaaggctataattaagcctccaaagccaattcgtggagggattccaataagttttccgcaattttcaaacctcg

SEQ ID NO: 1463 - DNA, 416 bp, Glycine max
  Clone ID: V4R-01-Q1-B1-E6
attcccatgacaggtgtctgtttgccttgttcctgatttaagccataatagccacacagagagagagagagagagaaagaaggcatgagaaaatgaatgatctccatcatcattcccttccccatgtgatgtgccacccctctctctagggttttcaattccaatttcaatccaacccaacacaaagctcccacctttcccattcattcgcacaattcccttcgcccttttccttttcagccaaaagggtctccggggcttcgcctctctttgaccgttccgggctcgcctccccaggcttcttgagagagagagagagagagagagagaaaactgcttttctagtgagagaaagtcaccatgggaatgtagagtggagcttcttcccttgttgtttttgttgttggtggtgaccg

SEQ ID NO: 1464 - DNA, 221 bp, Glycine max
  Clone ID: V4R-01-Q1-B1-E7
cggatgaagagtttctgccacgtcatagtggtgatcttagcattatgtatgatgtgatgagaacttatgattcaaattactgggctgaggttaccgttgcacagcataatccacttgggaggcttgatgactggaggtttagctgggactgtgataatgatgagtctatatattcaatgaaatgggcttatccttcggttgtggatgcttctgactgtctc

SEQ ID NO: 1465 - DNA, 307 bp, Glycine max
  Clone ID: V4R-01-Q1-B1-E8
cagaggaagaggaagagaatgctatccaatagggaatcggcacgtagatcgaggatgaggaaacagcagcacctggaaggtctcagtgcccaattggatcagctaaaaaaggataacacccaaatgaacacaaacataggcatcagcacgcagctgtacctcaacgtggaagctgagaacgcgattctgagggctcaaatggaagaactgagcaagagattgaactctctgaacgaaatgatcagtttgattaactccaccaccaccaccaacaactgcttgatgttcgatgaggcacaggagacta

SEQ ID NO: 1466 - DNA, 262 bp, Glycine max
  Clone ID: V4R-01-Q1-B1-E9
gcgtgaaagaggaatcaccattgatattgctttgtggaagtttgaagcaacaaagtattattgcacagttattgatgcgcctggacatagggatttcattacgaatatgattactgggacatcccaagctgactgtgctgttcttatcattgattcgaccactggtggttttgaagctggtatttccaaggatggacagactcgtgagcatgctctgctttcattcacccttggtgtgaaacatacgatttgctgctgtgac

SEQ ID NO: 1467 - DNA, 388 bp, Glycine max
  Clone ID: V4R-01-Q1-B1-F1
cctcctcgtcttcaatcctttcgttattctcttattcatccttctcttctgaataatccagatctctttctgcccttttctccgtcacgcttttcgtgaccggatctgtatggatttgatccagatctacacgccgatggtggttttggccgggtctttcatagatctggtgcgtagaggctcagatctacggtaccgaggtacaacagagaatcgatgacaagaacgcagatccgacggtagatccagccgattccgcttgtccgatcgctacagacccctgtatctgatcattaaagcagcggtgtctcgcgcgttctacacgtgttgccgatctcggatgttgtaaaattagtttatgatgtgaagctaaggagtggaaaatatg

SEQ ID NO: 1468 - DNA, 357 bp, Glycine max
  unsure (1)..(357): unsure at all n locations
  Clone ID: V4R-01-Q1-B1-F10
cgagggttatcatccccaccggtgaagtcaagcaattcaaagagatcgtgaaggctgcggaactcatgctcgaacaccccaactattttttggtcaattctcgttctttgcatataggaagaagattctctgctctcggtgctgatgaagagttggagttcggcaacgtgtatatcttcttcccgatgaggagagtgaactctcttgtcaccgcccctgacatggcagtactcttcttggccgccaactctgccgccaaaagattgtccggcagtaaggcgcgtgttctgccggacaactgtggcggcanagcatggcaacaaccggaagaagaagaggagagttcaaaagatgaaa

SEQ ID NO: 1469 - DNA, 405 bp, Glycine max
  Clone ID: V4R-01-Q1-B1-F11
gcgggaggcacttatcaaatttcctccaacatataaatttgagaggcacaaaccaggtttaggagggtatgattctggagagaaaaagcgaattccggcctggtgtgacagaataatataccgcgatactcggtcagctccagtttctgagtgcaatttagactgccctgttgtgtcatcaattttacagtatgatgcttgcatggatgtgactgatagtgatcacaaacctgtccggtgtaaattcaatgtaaaaatttctcatgttgatagatcaataaggagaaaagagttttggggtattatgacatcaaatgaaaaaatcagatccagtcttgaagaattaagttaagttccagaagccacagtcagcccaaacagtttaatccttcaaaatctggacac

SEQ ID NO: 1470 - DNA, 343 bp, Glycine max
  Clone ID: V4R-01-Q1-B1-F12
gcacaatggactaccttctacttcttccactaataatcaccatagtatggataaacattcatgtattcatctctagcttcaaaccactcaaatcctctaaaaatcccccgggtcctcgcccttttccaatcataggaaacatcttggagcttggcaaccagcctcaccaagcacttgccaagctttctcaaatttatggtcctataatgagtctcaagcttggtaagactaccaccattgtcatttcctctccacaagttgccaaagaagtgctacaaaaacgatcaaatttttgctaataggaaaatccctgataatctccgagcacttgattatcacatac

SEQ ID NO: 1471 - DNA, 441 bp, Glycine max
  unsure (1)..(441): unsure at all n locations
  Clone ID: V4R-01-Q1-B1-F2
gtttgcgttgggaatttggttctgttttttttttttttggtggtgagtcaccaatggaaggtggaatgatttttgcgtgaaaaaatgcttctcactatttctcaaagtagctttcaaaggttcgccatatttttattattaaaataaaaaaagaattccctttctttttcttctaattttaaagatttaactgccgaggaaaacgaggaaggaccagatacgagagcgagatactaaatacatgacagctcttttatgtttatgtgatttttttttttttgaactagttgcttgtgttgtgcgctttctatgatcaccttcaccggtactttcttctcctgcttctataatcatttttttgtttttgtctttgaaaaagtgtgcataccggttttggctttgctttcacgtacgtaccanaaatgatgattttggttgttg

SEQ ID NO: 1472 - DNA, 288 bp, Glycine max
  Clone ID: V4R-01-Q1-B1-F3
tgaataatgaatattgaatctaacccagaagccatggaattgtaacccaattccaaagcaaaagcacgatgaggatattgaaggttgcgacatgcaatctgaaccaatgggcgatggacttcgattgcaacgcgaagcaaatcaaggagtccatagcgaaggccaaagaagccggcgctgccattaggctcggacccgaactcgagattcccggttatggctgcgaagaccacttcttagagctcgacacagttaaccattcatgggagtgcttgaaagatttactga

SEQ ID NO: 1473 - DNA, 466 bp, Glycine max
  Clone ID: V4R-01-Q1-B1-F4
cgcgtcgctgctccgtaccagtttcactgcataaatttgagagaaaactctgcaaacatgttggtttatcaggacctccttacaggtgatgagcttctctcggactccttccgttacaatgaaattgagaatggaatgctgtgggaagttgaggggaagtgggttgttaagggagcagttgatgttgacattggtgcaaacccttctgctgagggtggagaagatgagggagtcgatgacgcagctttaaggttgttgacattgttgatacattcagacttcaggagcaacccgcttttgataagaaacagtttgttaccttcatgaagaggtttatcaagaatttgactcccaagctcgatgcagagaaacaagagttgtttaagaagcacattgagggagcaactaaatacctgctctctaagattaaggatttccagttttttgttggggagagcatgaatga

SEQ ID NO: 1474 - DNA, 382 bp, Glycine max
  Clone ID: V4R-01-Q1-B1-F5
ctcgagccgcaaacaacaaggttggttcaacttgtgtgaagggattggaacatggaaaatcttggtggttctagtcgtaagaaagcaattgaggagcttcttagagggcgtgattctgcccaacaacttaagagtgtcatcaatgggacttatgatgatggatcagccaccccatttgctcaacaacttgtgaaagaggtgctcatgtccttcacaaactccctcttgttcttgcacaacaaccccacttctgaatcacatcatgtcttcaatgttcaagtatgggactctcccaagtctgaggactctcaagagagcaattgcaaaagctccaacattaaggaaccaataaggtgctacaagagaagaagaactgaacaaa

SEQ ID NO: 1475 - DNA, 152 bp, Glycine max
  Clone ID: V4R-01-Q1-B1-F7
ccgattgctagaatggaatttcgatgctcagtcatctcttttaccagtctcatctcacttgcgcttgtcagagagacccatgtcgatgcatcgctatctgaggaagatttctgggaagctgtttggccaaacactcccattcccactgcagt

SEQ ID NO: 1476 - DNA, 439 bp, Glycine max
  Clone ID: V4R-01-Q1-B1-F8
caactacttccaccgatctgtcttccattgttacctttgacgtattgtcgggttcgtcggctccacagcacacggatctcacgacgttgagagtgatccatggcaccgttaacgccatatcgtggggcattttgttaccaatgggagccatcaccgcacgctaccttaggcacattcaagcactcggccctgcatggttctatgctcatgcaggaatgcaagtgtttggtttcgttctgggaacagtggggtttgtgatcggaatcaggctggggcaactgtcgccgggagtggagtataggctccaccggaagcttggaatggccgtgttttgtctggggggtctgcagactctggccttgttatttaagccaaacacaaagaacaagttcagaaaatactggaagtcctaccatcactttgtaaggtactcctgtgt

SEQ ID NO: 1477 - DNA, 275 bp, Glycine max
  Clone ID: V4R-01-Q1-B1-F9
tctctctctctctctctctctctctgaagatggcttcacgcatgctcgtatcttctctgattcgatcctcccttcgtagatctcaatcgaagccctcaatttccgcatcgacatcgaggctcacgtcatccaaccgtgcctcaccgcacggatacttgctgaaccgcgtcgccgagtacgccaccgccgcggctgctgctaccactcctcgctctcctcctcctccggggaagaatgagctcggctgcggcgggaagataccgatgaattcacgg

SEQ ID NO: 1478 - DNA, 206 bp, Glycine max
  Clone ID: V4R-01-Q1-B1-G1
aacaactcaaaaaaaaattaataaaataaaaataaaaaaaacggccgccactaaaaaatgtcctaattcactcggaaatacatcaagacaaatatcgggcggccctcccactattcacctcttctacctcggatttaattccggactgttccatgcaggcttaaaagctttccctaaaatgattcctactaaaacttggcgtaatc

SEQ ID NO: 1479 - DNA, 403 bp, Glycine max
  Clone ID: V4R-01-Q1-B1-G10
atggaggtttgcaagatagtggaaggtcaaaggtactcaaaaaggcttaatgagaggcaaatcaccgctttgctgaaagttacatgccagcgtcctgttgagagggagcgtgatatcatgcagacagtacaccacaatgcataccatgaagatccttatgccaaagaatttgggatcaagatcagtgagaagcttgctcaagttgaagctcgcatccttcctgctccatggctcaaatatcacgatacgggcagagaaaaggattgtcttcctcaagttgggcaatggaatatgatgaataagaaaatggttaatgggggaacagttaacaactggttctgcataaacttttcgaggaatgttcaagatagtgttgcccgcggtttttgctatgaacttgctc

SEQ ID NO: 1480 - DNA, 265 bp, Glycine max
  Clone ID: V4R-01-Q1-B1-G11
atcatcatcatcatcatcatcatcatcttcttcttcttcaatcagttgactcttcgttcctccctctattcatctgatggagcccatggacatcgttgggaaggccaatgaagacgcttctcttcctaaagcgacaatgacgaatattattaaagagatgttgcccccggacgtgcgtgtcgccagagatgcacaggatttattgatcgagtgttgtgtcgagtttataaaccttgtctcgtcggagtccaacgaagtctgtaac

SEQ ID NO: 1481 - DNA, 407 bp, Glycine max
  unsure (1)..(407): unsure at all n locations
  Clone ID: V4R-01-Q1-B1-G12
ctcgagccgttctggttgtttgttatttttggagacttaaatggatgctaagccgtggattaggtcaatttgatctcaactgaaactttttagcatttctgatggactcgaaaactagttctagatctctcccgaaacaccatcagaagacagctgggattcgaacccctgagacgaaagatgcagggtcttcttttcagaagatggggaaaacggagctggctgctcctgtggatttattgaagtctgcagcgaacgcatccaagcagaatactggggaaacggccgaaatcaagaaattaggaggtttaaccctanaagggtctgctgattccttgagcaataaaaattggtccggtgcttcctcatatgttctcgataaatctgttcgtgctgctaatgagaat

SEQ ID NO: 1482 - DNA, 439 bp, Glycine max
  Clone ID: V4R-01-Q1-B1-G2
cttctctctcagttacacacacattgcagcaacaatcacatccattttttctctatcactctgattccatgagtcgctacgatcccaatcccttcgacgaagaaccattcgaggttaatccattcgcggatggaacagctaaaggaaaagggtcagggcaatcacgttatagtggaggtgcattttatactactaacactggaagtgttccctctgcaaactcaaggctctcgccccttcctccagagccttacgatcgtggggcaactattgacatcccccttgataatgcagaggacataaaagcaaaggagaaggaacttcaagctaaagaggctgaattgataagaatggaacatgaactatgacgaagggaagatgctatagcacgagctggaatagttatagaggagaaaaattggccaactttttttcccat

SEQ ID NO: 1483 - DNA, 389 bp, Glycine max
  Clone ID: V4R-01-Q1-B1-G3
cttgttttgactacttttcaggatgcattatcaccaatggaacaggtgttgcgtagtccaatagccatgcttgcttttttactcattctgtttttttcaaatcaaaccacagcattaacttggagttttggtggagaagtagttgtgcaaagtttcttaaaattggatattccgggttggcttcattatgctacaattagagtaattgctgttctgcctgccctttactgtgtttggagctctagcaaggaccctggaatattcagatgtaccagttgcaagttttcatcttgatctacctgaaactatcatggagcctgatgttcctgtgactactgtaaaggagactcatccatttacatcatttccttgctccccaacatctgtta

SEQ ID NO: 1484 - DNA, 423 bp, Glycine max
  Clone ID: V4R-01-Q1-B1-G4
ctaagtacggcaatatcatatggagaatgaaaataacaggaagacagataaagagtggcttagtccaaaacctcacacgactccctttgttgcgttgtgtttcctttcgccgaaaacctcgctcgcaacttctagagaatctctttcaccatggatattgaggaggacatccgttctttacagctcgattcagcagaagacaataatggggtggtaaatgcagaggatggaaggccagaagaagttgagaaatctgataagatggatgaagatccaaagcaagatgttgaggctgagccaaacgctgttgaggctgagccaaaagtgaacgataacgacgttccttctgttcaagatgaagaagatgaaccagagatgacagaaagacacttgaatgttgtgtttactggtcatgttgatgct

SEQ ID NO: 1485 - DNA, 433 bp, Glycine max
  Clone ID: V4R-01-Q1-B1-G5
caaccttctctcttttcaatctcaattccttccttccttccttcttgttcttcttcttttttcctattattcaattcaactttcatgctttctgcaggatttatgtgatcgcaacatgggagtttgtttgagcgcccaaattaaagctgaaagcccatataacactgggttcaattcaaagtatgtgagtacggatggaaatgatttcggcagcacaaacgataaggtttcagcaaactcaattcctcaaactcctcggagtgagggtgagatcttgcggtcatccaatttgaagagctttcccttgtcagaacttaagacggccactagaaatttccgttcagatagcgtgttaggagaaggtggttttggattagtttttaaggggtggattcatgagaattcattgactgctaccaaacctggcactggc

SEQ ID NO: 1486 - DNA, 445 bp, Glycine max
  Clone ID: V4R-01-Q1-B1-G6
ggagagaggatgggtgcagaagcaaatggcggcgagaagcaattgaaatttctgatctacggtcgcaacggttggattggtggtctactgggtaagctctgcgaagagcgcgggatccaatatgagtacggcaccggcagattggagaaccgctcgtcgttggaggcggacatagcggctgtgaagcccagccacgtgttcaacgccgcgggtgtcacgggtagacccaatgtggactggtgcgaatctcacaaagttgaaaccatccgaagcaacgtcatcggcactctcagcctcgccgacgtctgccatcataaaggcctcatcctcatcaactacgccaccggctgcatcttcgagtacgattcttcccacactctcggattcggcatcgccttcaaggaacaagacactcccaatttcaccggatccctcgactccaaga

SEQ ID NO: 1487 - DNA, 289 bp, Glycine max
  Clone ID: V4R-01-Q1-B1-G7
cctctatccagcaatttgaggcatttgaatctctctggctccaaaaatctaattaaaatgccacacattggagatgcccgatatcttgagagtcatgatctccaaggatgtagactactcgaagagataggtctgtccgttgttccttcacgatagcttacttctcgtgaagttgagaaattgcaaaagtcttatcaagttgccacggtttggacatgatcgaattcggaacaatctagatgacgatggatgtatcagactcagaaacattgattcatcaatcggtctt

SEQ ID NO: 1488 - DNA, 444 bp, Glycine max
  Clone ID: V4R-01-Q1-B1-G8
caacttcattcattcaggctaaatggggaggatcaaacctcaggctctgctacagcaaagcaaaaggaagaaggggccttctcgcataagtgccaccattgttacattctatgcattgattcttgtcatgcttgtgtttatcctgtttgttacatacagacattggtccaacaggacaagacttcaaccagagagctatatatcagtctctgaggatgaaaatacatctgtggaatccaaaaaatctgatctacctggatatgctgttgtaattacctctaaaggttctattatagtagaactttacaaggaaagtgctcctgaagttgttgatgaattcatagatttatgtcaaaaagggcacttcaaggggatgctttttcaccaagtaattaaacactatataattcaggcaggtcataacaaagggcctggagctactga

SEQ ID NO: 1489 - DNA, 270 bp, Glycine max
  Clone ID: V4R-01-Q1-B1-G9
cgcaccttccctaacacccccattacaaatctctgtatttcagggttgaagattcacacattgaattgaagtttggaaatttgacacctaccccacaccatcatggcctgcatcgacaaattttgggttttcgccctcgctcttctcctcctcgcttcgcctctcctccaagttgctaggtgccagtcagactctgatgatgtactggaggctgctgaagaatcaggtgatattggcattgttggtgatgatgtccaagactttggtgat

SEQ ID NO: 1490 - DNA, 399 bp, Glycine max
  Clone ID: V4R-01-Q1-B1-H10
caatttctctctcttcttcactcttcattctcatttctcttctgaattattgccatggctaagagctcattcaagatggaacacccacttgagaggaggcaggctgaagcatctcgaataagagagaagtatcctgacagaattccagtaattgttgaaagggctgagaagagtgatgttcctgaaattgacaagaaaaagtatcttgtacccgctgatttgactgttggtcagtttgtgtatgtggtgcggaagagaatcaagctgagtcctgagaaggcgatcttcatttttgttaagaatattttaccaccaactgcggcaatgatgtctgcaatttatgaggaaaacaacgatgaagatgggtttctatatatgacttacagtggagagaacaca

SEQ ID NO: 1491 - DNA, 416 bp, Glycine max
  Clone ID: V4R-01-Q1-B1-H11
ccaaactcaagttcaccagaaagcaaccacaacaagcacttctcttatttcctatcacaccctattacagattcacaagcgcagacacttcaaatggctctggaagctcttcaatcacccagaactgccactccatcgtttagtccctttgaataaaccaacctcagttacttggagacaccgtggaccaaacgaaagcgttctaagcgtagccgcatggagcagcaactgcaacactcttcatgcaccgaggaagagtacctcgctctctgtctcatcatgctcgctcacggaggcacccgcagtgtttccgccgccaagcctgctgtttccgacaacaatttcgcgccgctaaccgacgccaaactgagctacaaatgttcggtctgcaacaaaaccttctcctcctaacaagc

SEQ ID NO: 1492 - DNA, 383 bp, Glycine max
  Clone ID: V4R-01-Q1-B1-H12
atgcaattgcattcctcacctcactctcattctcacacactgtgctccctctcttctcttctatttttatgtaatacacactctctcaaaccctaactctccaatcaatggccatcctgtcccaatccaccgccagcttctccttcgtctccactcggaccgattccactcacctaactcgcttcccctgccgcgtcaccttccgagcccgctctccccctctccgccccgccctcgtctcttcgcgcctcaactcctccaggtcccccgacgccggcggctccctctcgccggacaacggcggcggcgacgtcgcctaccagctccaccacgacttctctccgcagcgccgttcccgccgctcgccggtcttcgtcacgctg

SEQ ID NO: 1493 - DNA, 427 bp, Glycine max
  Clone ID: V4R-01-Q1-B1-H2
ctcaaaattgcctgagctgtggccagccagactgaccaaagtgccttattggttgttgagttcccaagttggagtttatggaaagccagcccctgaagatttcactgctgattatgaacactggaaacgtgtagtgtcccagtcttatctagatgggatgggaattaaatggtcaaatgtgcgcaatgtcatggatatgacgtctatctatggatgatttgctgcagctttgacagatttgaatgtttgggtcatgaatgtggttacaatagactcccctgatactcttcccattatttttgaacgaggtctgttcggtatagatcattattggtgtgaatcatttagcaactatcctacgacctatgatctcctccatgctgattatctgttttcaaagcttaagaacaagtgcaatttggcagct

SEQ ID NO: 1494 - DNA, 391 bp, Glycine max
  Clone ID: V4R-01-Q1-B1-H3
caaacccttttcacttctctctagggttttagcactctctctctctctcgttttcgttcttcctttctgcctctctcagtcacacaccttctcgatgaccaacgacaacatcgccgtgacagatctcacttctgccctcaatgaagataatcgcgccgacctagtcaatgctctcaagagcaagattcagagtctggctggggcgcattctgatgttctagagactctatccccgaatgtcaggaagcgtgttgaatctcttagagaaattcagggtaaacatgatgaactagaggcagacttcttgaaagagagagaagctcttgaagcaaagttacaaaaactgtatcagccattgtacacaaagcgctatgaaaatgttaatggtgtt

SEQ ID NO: 1495 - DNA, 449 bp, Glycine max
  unsure (1)..(449): unsure at all n locations
  Clone ID: V4R-01-Q1-B1-H4
ttcaaaagggagaagaaaaggaaagaaaactctcaaaaaactattatagcaatggcagaacaaaaccaaaaccaaacaactgaagctggaaggcaccaagaggttggtcacaagagccttctccagagtgatgctctttaccagtatattctggagacaagtgtctacccaagagaacctgaatccatgaaagaactgagagagttgacagcaaaacacccatggaacatcatgacaacctctgcagacgaagggcagttcttgaacatgctccttaagctcatcaatgccaagaacaccatggaaattggtgtctacactgggtattcacttcttgccaccgctctcgctcttcctgaagatggaaagatcttggccatggacattaacagggagaattatgaattggggntgcctgtaattaaaaaagcttgttttgaccacaaaat

SEQ ID NO: 1496 - DNA, 412 bp, Glycine max
  unsure (1)..(412): unsure at all n locations
  Clone ID: V4R-01-Q1-B1-H5
caaacttctaatggatacatcaagctaaagattgatagagcaagagagtgtgaaagtgcttgctctagaaattgttcgtgcgttgcttatgcttattatttgaacagtagtatctgccagttgtggcatggtcaggtattgagtctaaagaacatctcaacatatttggacaattctgataataccaatccaattttttacctcagacttgatgcgtcagaattggttactgctgattcaaacccaacaaatgcaacagaactagcaactgattttcgcaagcatgaaaacttgctgaggaatctacttctgattgttatactgatcntactttcagcatttcttatattgggcctaatagtttattggactagaagggaaaggagaaaaggggaagatttgctacgttttc

SEQ ID NO: 1497 - DNA, 458 bp, Glycine max
  Clone ID: V4R-01-Q1-B1-H6
cattcaaacaacataggaattaattgatttgggtgatgagcgcgtgaaaaagaagaagaagatgatggcagggaagaataaaggggtggcgccggaagacgccataatggccattggcttgggttacgatctcaccaacgatctgaagctcaaatcctgcaagaaccactccagattgatcgctattgacgatgacaaccttcgaactgtcgaactccctcctcggatttccatccctaatgtccccaaatccatcaagtgcgataaaggtgaccgcatgagattgtgctccgatgtcctctcttttcagcagatgtcagagcagttcaaccaggacttgtcactgtctggtaagattccaacgggccatttcaactctgcgtttgggtttaaaggagtttggcagaaagatgctgccaataccaagactcttgcttttgatggtgtatccatcacac

SEQ ID NO: 1498 - DNA, 379 bp, Glycine max
  Clone ID: V4R-01-Q1-B1-H7
ggaaggggccaccaaaccaaaccatacagcaatagcatatgccatttctctctgtaacaaaagtttctgtcttcacactccaaatgagaagcatatctcatcaccaatcatcactgctacagcttactcgtctccctgccctgccagtgccttcacttcacttgcactctttagatcagaattgaattgaatttgttgatgatgaacagactggtggtagaagttgtggaggctagcgacctgatgcccaaagatggggaagggtcagctagcccctttgtagaggtaaagttggatgagcagcagcacagcactgaaacaaagcacaaagacctgaatccttgttggaatgaaaagtttgtgttcaacatcaataacc

SEQ ID NO: 1499 - DNA, 265 bp, Glycine max
  Clone ID: V4R-01-Q1-B1-H8
aaaaaaaacctctcatttcaaagagagagagagagatttcacagaccaaattgcagaggacgacaaagttcacaacttcaaggaaaatcaagatggcccaagtgagcatagtgcaaaatcttgcccaaagcactcaaattttcggtcattcctccaatcccaacaaacccaaatcggcgaattccggttcaatgagggcacgcctttggggtccctcaaaatcccgcatcctggtgaacaaagctggaacccttatgggaaattt

SEQ ID NO: 1500 - DNA, 302 bp, Glycine max
  Clone ID: V4R-01-Q1-B1-H9
gacaataaaaaacgttgttgatagcaggaagatgcacgtcgcaattgcacaaggaaaacaacggaagccaagtttccgcgcattttgtcacataagaaaaacgaagtgtcaatccctttcttcttcgtttgtattgtttatgaattactaattactttggttttagacagttgtatggcactgcttttgtctctgtcgttgtatgatatcacatgaatgcattttggtttgcaacctgctgcgcttgcacagggttgagaagccaattttatggtgaatacaatcagatatatgcttttgta

SEQ ID NO: 1501 - DNA, 393 bp, Glycine max
  Clone ID: V4R-01-Q1-E1-A1
ttgaataatagtaataaaataataataaaggttctctgttgtcctcataaataaaaaaggtaaatgaatgataacaaaggataagggggaaaaatcaaagggtttcttttttgaaggatgacagggagactcaagactttacaagtacaataattacaacacaatcgttaaatcaagcccggcaactgatacaagctattgaataaaacctataggtactgaaacgaagcatgttagttgaaaaatgacaagttgacaatctgagtaacttcccacgaagccaactacaaatctctcaaaattggccaaccctttttaataatattgttgatcttggcatcaatttgcttttggatatttggagggcaaaactctgcaccatatccattcaat

SEQ ID NO: 1502 - DNA, 377 bp, Glycine max
  unsure (1)..(377): unsure at all n locations
  Clone ID: V4R-01-Q1-E1-A2
gaccatactcaattcatggtgatttaagtttcaatctctatcaaagtacacaaattcagagtatattgagggtgtaacctctctgcattaacatatttcaatacatacaaacacacaaatacacactcctgaaaacaactaactggattattcaaaaagattacgaaaggtaacacagaaatttgatataaaatggagggtatgctgccaagccatgatcatcttccatcatcaaaagcaatttgtacatgatcattaatgctgtcatacccaatagtatattgatggctgctgctatcaccaggttcacagacgctagatgattccttttgaagcaagtgagcctcctctggattttganatgtattgattcaagg

SEQ ID NO: 1503 - DNA, 377 bp, Glycine max
  Clone ID: V4R-01-Q1-E1-A3
aaattgacaaactcgcattaacccatacgggcaacttgtgtaagagagtgaatgcaagtcagggaggagtgcaatcgatgatgcaactttaagaggaacctaccaaaaatatgtttattaaatttcataataaagctagataattatgaataccaatctagccgagagcattgggggagggagcgttagggatcttcagcacaatcgaatgtcttgtgattgacatataaaacatataattaactaatgcgacaaaactacataagaaacatctagtatgttatttcactagatatttcaccatgtaaggtccttcaagctcatatcccagtttcctgtaataatggcgtgtgccaacccctgaaattacagctatt

SEQ ID NO: 1504 - DNA, 396 bp, Glycine max
  Clone ID: V4R-01-Q1-E1-A4
aaggattaaacctgtggcactgattccctttataaaagcacaaaatacggtgcaagccaccatattgtatgtgcctttagagttcaaaaagaatgaatccattacactatcaaccacacatttatccaatacaagtcttctatgaagccaaagaaagctagcaagggaccagcctaagcttggtaggtgaagttgcatcacctgtagttgacttgtggggatgggaaaaaacgttttgccagccgttggaagggtctcaatagttgggctcttttcttgcgccagaaccaaatggcagcgttgtaatgttcgttgcgaatctttcgcgtggctgccttccaatcatacttttccatctcttcacgtgcagcttttaccatgggtttctctcaaatc

SEQ ID NO: 1505 - DNA, 365 bp, Glycine max
  unsure (1)..(365): unsure at all n locations
  Clone ID: V4R-01-Q1-E1-A5
ttattattattatatatttgtgtgtggtagagggtgtcgcaaagcatgtctttgggcttcttcgtggatcttcttcgcgctaaggttgaactagccgttaagcgaggagacgcgatgagtttgtcttgtgcactacacgagctgttccaatcttcaactttttttaagactttttctttaagtttttgtatcaatttttcttctaaagcacttgtaattttcttcttttgaatcccgctggtcaaaaattaaaatgttattaaaatcctcattatttcatttanaacaatagtaaaatagaggaattctaatcattcctaatcaagattgactaataattaaacctaaattcacagttatcatat

SEQ ID NO: 1506 - DNA, 373 bp, Glycine max
  Clone ID: V4R-01-Q1-E1-A6
atacaaaaaagttgaatcacttttttcccccagaagtaggtacatgcagttacttggcatgcattaggggcctttattactatgtaatatatcatatcatatactaataatatggggtgtgttcgttcctcctgaatcattcattcagctcagcagcgtgaaccctttctgcagctaagtgatccagctgatgctgttatagaactcacaagtgaagatgattttgctgccaaactagatgctcttgcatagcttgaagattcacctgctcctgatgccgtaaaaaaaccaccttttacatcagatctccacttgacctcaattccaaatcctccactttgcctgtgctgaattctccctctttgtcacctcc

SEQ ID NO: 1507 - DNA, 386 bp, Glycine max
  Clone ID: V4R-01-Q1-E1-A7
gttgtagacataggcattatgagtcacattcttttaaattaaacaatgaatagcagcccggtagacggtggtaggggaattgaaattataactatgaaaatatgtaaatactagaactcaagggtagctcccggtatttacagcatccggcagtacatatggatctctctctctctcatttcgtgaactacaatgttttaccattgacaatggcatcaaaactcaatagaaaaagaagaaaaaagtgaacccgcacgttgcatatattagaagcatgctcaacaacttgtgtctgatctgggtgtttcattgtaatctagtagagaaatctggcgctgcagcctcatttgctgaaggaatttagcaatgaactcctcagcttgctt

SEQ ID NO: 1508 - DNA, 382 bp, Glycine max
  Clone ID: V4R-01-Q1-E1-A8
tttgaacatgacaatttcatatattattattatacttcacaatcagcatttctttgttcaagactgataataaccattaaattggggtcattgtaacaatcggaaaacgagggaaaggaatagaagaaaacaatgaacaacccttgccagttagttgcaccaaccaacaaggcaccaaccatagtaccaatcaaaaggtaaaaagagagagagaccaaatcctactaagaaaagcataactgttcctttcatccaaagggagaaaacatgcaggttttgctcatggcttccacagaatggttgtgtctgcaatcatggaagtaaccacgtatgggtccatgttggaagctggccttctgtcctcaaaatatcccttccctgc

SEQ ID NO: 1509 - DNA, 164 bp, Glycine max
  Clone ID: V4R-01-Q1-E1-B1
catcttaaactaacttggggaaaatgtattcaaattttcaccaaaaaacacaacttaaactttttctaaactaactccaaccaaaaccaattcgcaccaatcaaaaactcaatcaaattcctttcaatcaactactccatcttaacccagaaatccaactttct

SEQ ID NO: 1510 - DNA, 319 bp, Glycine max
  Clone ID: V4R-01-Q1-E1-B2
ccgtaaataacttttggattggatcctttcttgttgtccacatgtgacaaacaggatctgggcaaggaagagggttactacttactacaatattaaacaatgaggaacttttttgttttgaatcaagagattgtcataaacataatataaaggacatcctgaatttaatctcataaaaagcaagccaaactactacaggggcccctcaattcaagtgggcccctctacctatgaagacatgattgctatcattttgtactcctagctttctgaaatctgaccaaaacaatatacagatgcagggataagtatgctttaa

SEQ ID NO: 1511 - DNA, 275 bp, Glycine max
  Clone ID: V4R-01-Q1-E1-B3
ccaacaaaaagggaaacacttcccaattaaaaaaacttaacaccttaaaattcaaaacccaaaaataccaacttttttggtcaacaaaaacccccaaaaaaaacctaaaaaaaggaaaccaggttgcacccccccaaaattacaaggcaaatttaccaaaaaaaacaaatacagttactcaaaattattaaaaaacaggtaccccacctcaaaaaaacctttaaagtaaattttacccccaatttaaaaccaaaaagttttaaccaaaccccttt

SEQ ID NO: 1512 - DNA, 210 bp, Glycine max
  Clone ID: V4R-01-Q1-E1-B4
aaaaaaagacaatcccattatttccaaggcacataaataacaagtcccttaaaccaatttaaataaacaatcattttaaataaaaaaacaaccaaaatcaaacaacatattatcataaaacaccctaacttcggtcataccacaatatattaaatgaagaataagttcggaaaaaccataatccccataataactctaacgatcaaaaca

SEQ ID NO: 1513 - DNA, 277 bp, Glycine max
  Clone ID: V4R-01-Q1-E1-B5
gggcaggggaaaaaggtaacaaaacaaaaaccaaaccaaaggtatttcaaacattgtccctttgaggaccacatccaacaattcattctaacaaaataatcccctttatttaaaaaacaaatttttaccaagtaaacaaacttatcacctaggctttgcacctaaaacaaactaattaaggtacccaaccacagtgatctatttcacatcaggatatagaactcaagcctccactccaaaagaaaacccaatttcaaagttagtaagatcccccttt

SEQ ID NO: 1514 - DNA, 369 bp, Glycine max
  Clone ID: V4R-01-Q1-E1-B6
tgcggactaaataatttattgataagaaaacaagacgtataagcaatttcaatctcaagatagtactcctagtcctaggacgagagtatagtattacatccaaatgttctcaactgacaacagataaaagccataaaacacacaacgataaaaaaataataataatcatataaatgaagataacttggtcaaagaatagacgaaaccttcctttatacagagatattaaatatggagaattaattctgatttacatggctatacgtgtgtgtgtgcctatatatatattatagagatacacacatatatatataaatatcaaacaatttaaatatattttataacaaggtgtacctccaaccacagttt

SEQ ID NO: 1515 - DNA, 379 bp, Glycine max
  unsure (1)..(379): unsure at all n locations
  Clone ID: V4R-01-Q1-E1-B7
gggcaagaaggaataaaactttctttacggagttccctcaaatttacatttgttacagagcttagcaatagggtagggggacaaaaatatggggcctaggttagagctcctaaagaatgaaaggcagcaaaaggaaaaactaatatacaaaaagaatgacactaaaccacagtagctaatctacaaatttggtatgtatgtatttttggaggatatacaaaaaagggtgaccgacttaataatttcccacccctcgagtagaaaaccgcatgttattgcaaataaagtcaaagaccttacacagaattgggaggtgttgttgaatgtgaagaggaatcctcctcctctgggcctgatanatccaatgccgtttcaaggt

SEQ ID NO: 1516 - DNA, 368 bp, Glycine max
  Clone ID: V4R-01-Q1-E1-B8
tttgcgtagaattatgtatctattatgactcaggaaacaactacagggtaatatatagtagagtagtagaccaaaaccttgagcgtaatgtacatctgtagtgtggtgtaaggtttctcatttcagtcactacaaggaactaaacgaggaaacaagctgagtatcctactcatatcacgagttaaataaaactaaagcccgtggaagagggcaggaaaataacgctgaagtcataccagacgtttctttttctttcatttatgtattagcatttacaacgagctttgagattctacaaaatgcattatagaacagaggtaaatctcaagtcctatggagagactacttgctcaattaaaagtcaaaaa

SEQ ID NO: 1517 - DNA, 401 bp, Glycine max
  Clone ID: V4R-01-Q1-E1-C1
aaaaatgtattaaaaatataaaattaccatcattggttgccatattcacatgttgcttatttgacaaaatacattgatattacgtggctacaatatacttccaaatgctcaacactgaacaaaaaaaacaagtacctaggtttgaacatggatcttgtggaaaagttgaagcacaaaaatctactctacataaggagggtcacaaagatggattgtaagaaaaaaagtcctataatacagaaattttaaatattcacggcaatgcagcataacctaacaatacatcacgcaggatacacggttataccagcagccatgtacccccatcttcttaggctgtaacagtttttgttttaaccccaattttctttcaagacacactaggcataatttgttttgtg

SEQ ID NO: 1518 - DNA, 364 bp, Glycine max
  Clone ID: V4R-01-Q1-E1-C2
actccaatttctgattatcatttcattaaatcgactataaacaaccagatatattggtcaaaaacaagaaccacggtgacacaggggcataaagatactcaaactcaaacacaactaaaattactgagcataatcataaaccctaatcaacgacatcaagccctagtttctccagcctccatcaccaccgtcaccaccacgagagtaaccacggtcaccaccaccaccataaccacggtctctgccaccgccatagccaccgccaccgccaccgccatatccaccgccgccgccatagcctccaccgccaccgctacagttgtatccccctccaccaccgcgaccaccaccaccatatccacca

SEQ ID NO: 1519 - DNA, 320 bp, Glycine max
  unsure (1)..(320): unsure at all n locations
  Clone ID: V4R-01-Q1-E1-C3
tttttagggttaaaaaaaatatatggaaattaatatagttacatggcactttacaacaaaagggcgctcatgaagccgtaattgcagctacctagtcacacagattgaataaattacctaagggagtttgattggcaacaagattgaattttcattcaacttgatcgtttcctgcttgtaagcacggaacttaagtgataaaaaaattaaagacgaattattatttttccttatatgcttgcttcaagtccttgagtcntctgctttaaacatactcaggattcagtgctaatgcttccctgtaaattcacccctttaat

SEQ ID NO: 1520 - DNA, 157 bp, Glycine max
  Clone ID: V4R-01-Q1-E1-C5
ctattattattattttttatattattttaattctatattatcatacaatttttgctcagggggataaaccacaacaaaactaatatttttacccatctatctcaaaactaatccaacacctatctctacctagattcactttctccagataaactcc

SEQ ID NO: 1521 - DNA, 350 bp, Glycine max
  Clone ID: V4R-01-Q1-E1-C6
gggatattagagtactattattaatgggacacaattgagttcaacacaaaccgaacttattttcaagggacagtattacagacccattaaacatcaaagttcttcaaatgttttgggaacacatccaacattacacaacgagcttaaaaccccccacggagacggaggacaaggtgaagggttgattccttctggatgttgtagtcagcgagggtccttccatcctcgagctgcttgccagcaaaaatcagcctctgctggtccggtgggatgccttccttgtcctgaatcttggccttcacattgtcaatggtgtcaaagccctccacctcgatggtaatagtcttacc

SEQ ID NO: 1522 - DNA, 279 bp, Glycine max
  Clone ID: V4R-01-Q1-E1-C7
tttcaaactgcaaatatggagaatgagaagtttctatacacataacaagacatacgtaattacatgacaagtttttagataaggcgcaccttctcactggccactccgatctcttcactagaagaaatgatactattttcataaatatcttcaacatcttgcttacataccaaacgacatccgcacctcactatttccaatgattggcaaccataacttttcaatacaaattcaatttcactgccgacaacaccttcacaaatcatgtcacggtattta

SEQ ID NO: 1523 - DNA, 346 bp, Glycine max
  Clone ID: V4R-01-Q1-E1-C8
gataaagaatatcctgagtttgataaggttcttgagcatgcattttatccaacaaaatcatataccatccttcaggaaacaatgccttagtgaatcaagagaagctataaaggacttaaaaaaatttgatattagaagacgaggaacattattgtgggacagagaatgaataagagcttgaactctccctcttgcatgaagattcagccgtggaggacacgtcttgatcaatgcttgacaccccggtatccttgctaagatttcgcgaattattctgcttctgctcgacctctgccgaacattttggtctctttctattaagaagatcaatctggggattatcaag

SEQ ID NO: 1524 - DNA, 330 bp, Glycine max
  Clone ID: V4R-01-Q1-E1-D1
cacgaatcataatataaaaagttttattaatattaatgtcttctaattcagtttagctaaaatgatctatgcggactctgcctcatgacacaattcgatcgtctcagtgtacgtagtacgtacacaaaagtatatacggcttcgtccaaactcgaatgtgagggagagaaagtagtttacaatgaaacaagcaacacagcaaaccttgcaccagggaattgaagtaacgaacagaaaacaaaaaatgtcactttgtcaaatgataaaccagaactataagggagagcatacaaccgcccaatcaagaagaactcatacatctctcaatct

SEQ ID NO: 1525 - DNA, 377 bp, Glycine max
  Clone ID: V4R-01-Q1-E1-D2
attaaaccttaatttctttaaattaaaataagcccataggtggtacaaatccaaagagaattgacagtcactttaacaggggtttaagcctttatttcaactaacaaaatgctaataaaatcactcaacaaaagtggcaccctctactcttcttggaacatggtgcaattgacaattcgaaacttctccacttgtaacgtggacctaaatttaaatagcatagttaacacttgttgaaaagcttccttgaccttctttattttagcccttgccataagtcctccaagtccttctaaaggttccttactcttattcattaccttgtcatcatcaacatggcaacatagatattatcctttgcatcactagctgaatat

SEQ ID NO: 1526 - DNA, 279 bp, Glycine max
  Clone ID: V4R-01-Q1-E1-D3
agaatggcatcaatgatcaatatcccaccatttatccaaaggaagtacatgattatatgccatcattaatatcttataccacttgactacgtacgtaacaattattccacccccctcttgaatttgtcatttgagcttaatgacatgacccacaaactaactacttactggtcgctaaaaccttacattagcatacaagtcaaattacaccttctcccactaattctttgattaaagcacccctcaaattaagtaatagtagcgttcacattgacaatg

SEQ ID NO: 1527 - DNA, 359 bp, Glycine max
  Clone ID: V4R-01-Q1-E1-D4
atattgaggagttcttttcttcgcttatttattaatttaaataaaaaccacaaggaaaaaaaaagggtttatgcagaaaaattccacagggatgatgaacagggtttgggacttgacttatatccgcacccctcccacaaggcttttttacacgcaaaatggcaccaacaatggaaaaacatgcatcatcataatagtaatcaccatcaccagtgccttccctgagaaccaccaccaccaccaccacctttgttcttcccaaagaaggcattattcttgggttttgacttcggtaactcatggatgtctatcacctgaatcgttctttgccttttggcaatttcagcctctttgtaatt

SEQ ID NO: 1528 - DNA, 376 bp, Glycine max
  unsure (1)..(376): unsure at all n locations
  Clone ID: V4R-01-Q1-E1-D5
ttttcaaggcaatggaagttttcttgatgaaatgacataaataaaatttctacaaagcccagttaaataaaaatagcgtccagggttatcagatatcaaatctatgatatgatgatccaataacctatgaagcacggacaccccagccctttgtcgtgtccgatgttcgacccacgtccgtgtcagtgtccaacacggacacaacacccatactacgttctatattttggacattacaggtgtcaacgtgtccgtgtccggtgtccgtatcggtgtcaatacttcatagccagtagcaagcaaaactgaaaggtagtttcaattgggtataagttgctaanaaaaattaaaaacatagactactcagtacttgact

SEQ ID NO: 1529 - DNA, 385 bp, Glycine max
  Clone ID: V4R-01-Q1-E1-D6
cttcacatacatctcttccttcgtgatgattaaaatgaaagcaacaaaatacatagttttcgaatactttgcaaggcaaaccttattacaccaaaacatattacatatagtttaacaatcaacaatacacacaactaacatataattaaatatcacatacttttgtaacaacttggagataaacgtggtttaacaagaacctcaagtggagtggctttagtgttggttactccaaaggcttcagtcatatcaagaggttcagttgacggatttaagatttcaaaggaatgcaagaaactagcaagtgccaaatgaactgtttgaaggccaaaggatattccagggcaaacccttctaccacttccaaatggtaatagctgaaaat

SEQ ID NO: 1530 - DNA, 382 bp, Glycine max
  Clone ID: V4R-01-Q1-E1-D7
ttttgcatatatgactcgggggttatttttgattttgcaaattacacaatcacagccgtacatcacacgtgagctgggcctcggggaacttaaaagcagaggataacattggcccatgacgcaacacatgcaccacctaataatcataattttacatctttacatacaaaatacaaagactttaaattaaaattaaaaataaaaaagataggacagatcatcttgatgaaatgaaaccgaaacccagaaacattgttttgattttttttgttgttcccaacttgattaagcatgaacggtttgattgaatcacttggacttgaaaggaatggccctgattacgacctggtggtagagtgctgcaagtgcagcaccaatgaaa

SEQ ID NO: 1531 - DNA, 350 bp, Glycine max
  Clone ID: V4R-01-Q1-E1-D8
cacaaatcaaacactgcctcaaagaaatgtacaaacatgcaaccagccaatgcatgaccaaaaatgtgggcctaaaaattgttggaatataaaatgcaaagatgtaaatataataaagctactttcagaaaaataattagagcagttttccttcaagaacaagggcattgaagattaaatgcagataccctcttcaaatgcacactagcacaaccctcccttttgtaagcactggggagtagatgcctcctagattcagttatactttaatcctcattttgactttcatccttgataagcttgatcatgtcatcaattcgaaggatagtaatggcagcttcagttgcaaa

SEQ ID NO: 1532 - DNA, 387 bp, Glycine max
  Clone ID: V4R-01-Q1-E1-E1
agctggtaatccttctcataaattggactcagtagtagtacaaagaaactaacagtctcgggtttgtgcaggggaataaaagaatgggagcattgcattgcaagtaccaagcagttctttcacttatttgcttctcatgcacctagtaataacctctacaaaattcttatacatgtgttgcttcaaatacatcttctgcaccttctttcttccttccacccccatttgcttccttgccaactggtttttgagtaaaaaccggagattctgtgcaagaacatcattccccggatgtccaacacgatgaacaagaccagtaacattgttctcaacaatctcgcgtgttcctccagcatccgttccaggaacctacgccaccaaaatgaa

SEQ ID NO: 1533 - DNA, 370 bp, Glycine max
  Clone ID: V4R-01-Q1-E1-E2
aattataaaataagatgtcatacacgacaatctcccttttttattttttcaaacaaacgagaaaatattgctcgacttgaggacaaaaagtataaatgaccatgctaaaataacacatgaatgttctttcaacacattccacattgatgctaacacaaactcgtgtttttcactagacgaacatcgttctccaatcccaacatgatgctgagtcacaatcaatttcaggaaacaagtctcaggaatgaactccatgaagccaattcaagtcaatgtcctctctaaatatctctatcttcaaattgggaaaggcacgaaaattttcccataaggtaaccgtttcttcgtcacagatcacatttatttcatg

SEQ ID NO: 1534 - DNA, 155 bp, Glycine max
  Clone ID: V4R-01-Q1-E1-E3
gggccgagccttaaacaattaaataaaaacctcaccgggaaacaaaaaataacaacccaatttcaccaaaaaaacaccttaaaaaaggggaaaaaacaaaactcacaattcaactccaacattatcactgaacccaaaacggttcttccaacccc

SEQ ID NO: 1535 - DNA, 402 bp, Glycine max
  Clone ID: V4R-01-Q1-E1-E4
tttataaaaacatgcacggcgcaaagtcgcaaacactcacgcgccctaacttaatcaccctttatttatatataatcatcataatgataatatataatcatcatcccaatcatgatagggtgtaattaagtacctaattttgaaatcattcaaccgtccaaaacagaaattaccaaagccagagaagagacaaaacagcagaagaaaactaagaacacaaataccaacatagttttatactacaatttataaagtaaaactaaaacttaagaaaacgccatttattaattattagccttctagtaaattaagtgacggttgggcacaacgacgtcgtccagcatccacatgtcatccatgttgttccactcagcaccaatgttgttgctaacaggcagctca

SEQ ID NO: 1536 - DNA, 387 bp, Glycine max
  Clone ID: V4R-01-Q1-E1-E5
aacgacatacaggccaacttatagtgttgtaaaatgatcccgtcaattgtcaaatacatgcattcattgcctacgaggtgtaggggcaaacattttatgagtacgagaacccaacgtgaaaatacaataaaattggaggttttaatttcgattttccataaacaactgtgggctattctacttgtacgtaaattatgaccgaactagtcatcagttgcaggaaaatattatttaacaaaactctatgcatgagttcatccggccgtcctacatgaaggtttaagtggaacatgaaggggggaaattgttggagacactttcctttcagagttcatcggtgcggcaacaagctacctgtacaggacacaaaacacaacgagatctttc

SEQ ID NO: 1537 - DNA, 242 bp, Glycine max
  Clone ID: V4R-01-Q1-E1-E6
cacggtcaaaccacggcgtgaaaaaacaataaattaaacaattcaacaattcaaacattataacaaccaaaatgataccaccttccaacccaaaatatttaataaataccaaaaaacccaaatttttttcctaacaaattatgggccccatcccctaacaaacctacaattaaaacttccacattttaccaccccttcaaaccatgaaagaggacggaaaaacccctcccaaaattaaggtt

SEQ ID NO: 1538 - DNA, 383 bp, Glycine max
  Clone ID: V4R-01-Q1-E1-E7
tttaacataaaaaggaatatatttctatcatctaacataaatctacaatcttctgtactataacaagctcaaaagaatcacgtggaattgaacaatgaatgccacagcatccaaaccagacagacacacgcatgaatgttacaacagcacgattaagtccactgagtttctgtggtgaggtcaatatatgaatcaaatcgtgtctcgggactcagtagccactattaccgcatcaagaggatcatcaacagtgttagaagcaaggaagtagccaatgaaaaaccattcctgaaaccactactgcttggatacactgaaagaagagaacattcttcgccatttgaaaaatacctttagtgggaaaaccatctccacgagctacg

SEQ ID NO: 1539 - DNA, 359 bp, Glycine max
  Clone ID: V4R-01-Q1-E1-E8
gaaaacaatagacattacttattacaagaaaaacaaaaacaaaaaaacaaattaaaacaagagacaagaaacacgtgttgtagttgtgttacaaaggattagcaccaggattcacaaaaactccaactcaaaattaatttcaccaatcaatacatcatcaacatgtcattgtcagcgtaagccatgatttgttgattgagtggtattccgtaattccaagcatccatgaagccacaatcattgaacaactgagtcgtagtctcctgtgcctcatcgaacatcaagcagttgttggtggtggtggtggagttaatcaaacttatcatttcgttcagagagttcaatctcttgcccagttc

SEQ ID NO: 1540 - DNA, 318 bp, Glycine max
  unsure (1)..(318): unsure at all n locations
  Clone ID: V4R-01-Q1-E1-F1
acatactgaataacttgataccaagaaaaaatatcattctatgcttgtgtaaagagccgaagttagcttcagggtaaagaattgtanaagcctaaccagattctttgtaaatccacgatatttcttcaaaaataccttgacaaccacaatgatattgtcatagcagaagtcatatagcgtcttcacattgatattccaatcatcgccagaagatttacaatgttaatgacctaattctgcattacaaatgttgtcgcccgaatctgaacttcttacaagtagataattgttacattatacaagaccccccgcaataca

SEQ ID NO: 1541 - DNA, 339 bp, Glycine max
  Clone ID: V4R-01-Q1-E1-F2
acatgaccttaataaacacgtatttacaacttctcaatgctggaaaaatgcgagcagccggaagaggatgaggagtttaagggtgttttgctagaattaatgtttgatgactgactaagcatgtcctggaaattgaggacgattaatccaaagtttgctcaaagcccgcaggcgttgaaaatattcccccaaagcgggcagaaatcgaccagtctgacgtatggtaagtattcgatacatttgccgcaacgtttcttgtcgtagatgatcagcctggttcagaaagctcacaagagcttctagcctctccattgcagtagcaatttggggaaagtgggt

SEQ ID NO: 1542 - DNA, 310 bp, Glycine max
  Clone ID: V4R-01-Q1-E1-F3
agcgaaactgctgaaacatgattgacattgactaattaataatacttttagactgacataataagggccgggatgaaaggttgaatgaatttcatcagtcctgcgtatgaaaatctataattcatttattttattttattaggggaagggttaattttaattagaatccaacattaggattgcctgaaccagcagcagcaactcccatcccaccaacaacatctgatgtagctgccaatgcctcaaggtcccccgaatccttaacatccttaacaaccaattcaattatcagttcaacaattttcccaaa

SEQ ID NO: 1543 - DNA, 379 bp, Glycine max
  Clone ID: V4R-01-Q1-E1-F4
aaattcccaactcgtattcaattcttattgataaaactattaagttaaaatatttctagtagacatcgaggcattcttcaaaaaaagaatcctggaagcccttccagcacaaccaaaatcataaattaatgaaattctaacccatcgataattaaatttgatgggaattatgatgtagcacaaaatgtctcaccattaaaatcaaaataacaagtcgaagttttaagtaacttaggacagaacttaaaaaaaaaaactaggtaaaatgagagtagataacttggtacattatgtcacttagcacttaacctcctttaaggcatatgcaaagtataagaatgttggatcagcagcaccatccttgtagtatgcaaagacc

SEQ ID NO: 1544 - DNA, 267 bp, Glycine max
  Clone ID: V4R-01-Q1-E1-F5
gcactgccttcgctgaagtaaaggttaaatttaaaaaaaaaaatcacaaacgagaacgaggacatgctcatctaatttcaaggaagggttcaaagacaaaatcaagctgggcagaatcatacaagacatccgaaatgtccacactcttgtactcagagtcaagtgttgatgatagagtgacatgatgccttggtgagctatcaaaagttaggtcagaagagatgaggtaatcatttgatgaaatttagggatggacctcctccttgc

SEQ ID NO: 1545 - DNA, 369 bp, Glycine max
  Clone ID: V4R-01-Q1-E1-F7
gacttaaaaaagcacactgcatattcatcaaagcatcatcaaagcacactgcatcctaacagcacacgtacgtagaaaggtgaggttccaggtcttgcacaacatacacaacacaccataatttattttatatacaatcttatggtgcccaagatgcagatgcatggactaattaaacaacaacgttagtctgataggcagtgtccatagataaattgggtacccataaaatggccttgcttccaaggaaatggcaaacagggttagttccaggattaactcccatgagttcatgaagcatgtgatgattcattccagaagtatctgagtggcaaacagcaagtgcctgaattttggttccatcaccag

SEQ ID NO: 1546 - DNA, 338 bp, Glycine max
  Clone ID: V4R-01-Q1-E1-F8
atatataattgcagaccttggcattaattggagagaaaatgtaatgtattagtaaaagagaaattaaagaggaatgaaatgtaataatatataataagaataatgatgaatgttaattgtggatgggtttgtgggaagttccaatgagtccctctctcctcatcttgtcttccttggatttcctacagaagacaacccaagagttgacctccaaagcaatgcaaagcccaatgagagtggagagccctaagcagtaagtcaacttggcgtaagatctgcttgcccccataacctcaaatccctgaaagacattcacaaagccaaggaccacacacgag

SEQ ID NO: 1547 - DNA, 161 bp, Glycine max
  Clone ID: V4R-01-Q1-E1-G1
cttatcttatttattctttcattctattcatatctcttctattttcgcaaccaaattccccaccttacccttcccttcataccacgtcacagcccaaccacagtcttaaccaaaatcaatccccttgcagcacatcaaccaatccccaactggcaaaaccc

SEQ ID NO: 1548 - DNA, 122 bp, Glycine max
  Clone ID: V4R-01-Q1-E1-G2
aacaaaaatataaaagagacgctgaaataaatcatttgtaaaggggcgatctcagggaattatttctatatatgcacaactaagcttctatcttaattatctggttttttaaccccaaagtt

SEQ ID NO: 1549 - DNA, 380 bp, Glycine max
  Clone ID: V4R-01-Q1-E1-G3
ggcaaccataccaagtgcctttaataacactcaataaaaacacatcgaaaattattttcccttgttaagagtgacagggggttgacaattttattcccatttggtttccccacctagcatgcagttgcgagtgaagtaatgaaaaataagccaaaatggtaaaagtcagtttccatctaaccatttgttttcctttgatttttttgcaattacatatagtaattctaaccctacgtgtatataacattacaaggaaataaaatctgcggcgaggattggtacatggagacagcagtcttgtggcgaggaaattggtaatcctttgatctacagcatgaactgcttcacaaatcaaaacaccccaaggaacacagcttatg

SEQ ID NO: 1550 - DNA, 373 bp, Glycine max
  Clone ID: V4R-01-Q1-E1-G4
ttttcacgtttactaagcaacatgattcattaaaacaatatcactatcagaattaaatatgctagtcaactacaactaggaaaggggtttaaccgctgttgggctaaaatagtcatcagattccacagctaataacgcagattgatttaaaaccatccattttcaaattatatctcacgagtagcacggttggaagcagccaaccgcaagatactgaagcatccaggccttgtaacgccgtatacaagtacatcatggacaccagcggcaacatataactcttcactgaatactaccccaagtaaaagcaatataaataccgatatgaatatatcgtatacttgatgctgtcaattaagcctcagctgccact

SEQ ID NO: 1551 - DNA, 296 bp, Glycine max
  Clone ID: V4R-01-Q1-E1-G5
aaaatgtactactatttggtatgtttgaggtagaggtcacataaggcaactaggtgttacaaaatagactagggaaccacagcaccctaatatagacaacaagaacaaaaatgagctaatcagagctatcatacaaatataatgtacctgccttcgcatcgagtttagtagttacaaacacttaaaacagaactccgaaaatattaattggtggactagcaatactgaatacattatgtgaaataagatatgtacaatactagagtgcaataggctaatagctaccgaggtgactg

SEQ ID NO: 1552 - DNA, 362 bp, Glycine max
  Clone ID: V4R-01-Q1-E1-G6
taagtaggtaacaactagtttattcatatcataataaaaaatacaaatataacattaaaattaaatgcaacaaaacagacgagggaaaatctgaaatggtcagcagaagaagatgtaaattaaaacggtaaactaacataacatgtccaagttatgttatgcctttttctgatttggctggaatacatacttaacgagggagtctttgatggacaaaagttgaggaaactcattcttcaacttagatgcgtcaagctcgttgttgcttctaggggcaacaatcaccttagcctgctcctccagagtgaagttcttccatgtaaagttcggatccacgtattccttgtacatctgtaaaatct

SEQ ID NO: 1553 - DNA, 275 bp, Glycine max
  Clone ID: V4R-01-Q1-E1-G7
acgccaccaagcttattcaaaatttgaaggacaactcaaatgaatagggggagagaagaaatgatgattctacggcctaagcttcaactttactatcttttcctgggaggaccttgcatcatcttttctcccttcagctcacattttcttcaatttccccaaatttgtgcttcctttgttcaatatcccctttatatagccagcgatatccgtatttcttcacctccgcatatgactctttcaacactccatcagatctcgaaaccaatctgcca

SEQ ID NO: 1554 - DNA, 367 bp, Glycine max
  Clone ID: V4R-01-Q1-E1-G8
aaccaaatgaaaatatgaattgagcatcattacaaaatagattacaaagccaatatgtctggggaggcccaaaaagactaaaaaagtcatcaactgaaacactatgaaacagcataggtagacaaataaaagccttttttttctgtgatctcaatgtgccccctttgaggttaccaatgaagagtaatgccaaaataaaatagaagagttgatatcaccaaactggcaagttgcaatacagaccttcctacatacatcttgccacatcaaaagaagaccaaacaatatgacagaaaggagatttcataatccctgaatgagaaactgaaacatgtagctaaaactgcatcacaactcaaacgtttca

SEQ ID NO: 1555 - DNA, 335 bp, Glycine max
  Clone ID: V4R-01-Q1-E1-H2
ttttgcctgaccgattcaccggtaaaatcagccagtctaaagtcagagctttataatatatattaatatgaccatttctggtgaggtgaatattcataattgtcaactattacaacgcttataattatatagcccactggcctctacacttgcatgaatgcgatcacatttccttcatgctatggcactatgttacaacagatgacacgagtttaataattatcactcccagatctcagaacttttacccatcaggatatcttccaactacgtacatattcctaattaacatgattcagctcactcacaactggaagcacagtcaaacaggaatt

SEQ ID NO: 1556 - DNA, 100 bp, Glycine max
  Clone ID: V4R-01-Q1-E1-H3
ggcccatgttcatacaatccctttaaaaatactaaaccacaattaaccacatcatatttaaccatccttaactgttaaaaacaaacccaatttattccca

SEQ ID NO: 1557 - DNA, 137 bp, Glycine max
  Clone ID: V4R-01-Q1-E1-H4
gtggaagtaaatcacataagaaaaaaatcactttcaaatataacctttaaatgtccacaattttccaagaggaatgggagaaaaaaatttcgaaacaaaatttttttttaaaaaaaaatttttaattcctttaaaaa

SEQ ID NO: 1558 - DNA, 341 bp, Glycine max
  Clone ID: V4R-01-Q1-E1-H5
gctcaaaaaattctgcatgaactaaaacgaaaaagacactattttgcaagaccaaaagcatatgggcccaggggagtacaagccagtttaattgattaaactaaaatataacacattattttgaacattctttaactgttgaaatcaaactcagttttttctcatttgattcagtgagaccgtgagtaataaggtacataaggagaaatggggggtagtggaaacatcaacagaacaaatgtcttactattaaatcttacaatgagaagagtttaatagtaactcatcttgcttccaccattgtatctgtgatcaaattcaaagaaaaaccttctggcatg

SEQ ID NO: 1559 - DNA, 224 bp, Glycine max
  Clone ID: V4R-01-Q1-E1-H6
attatatgacactactgcataaaacacgtcactaaaataagattgcattcacacatatatgcaaagcgaatgggggatataactggcatgacaacacaatcctttcccaaaacttcaaggaattccccaaaagtttctgcagtgcacgtatacacaaataatagtcatcaaaaatgtgtatgcaaaaaaaatcacagacgatctacaaatacacacgctcatct

SEQ ID NO: 1560 - DNA, 374 bp, Glycine max
  Clone ID: V4R-01-Q1-E1-H7
aaataaagctgttacgagcacgaagaatatttattttcatagctgaaactgaagctttgggatttggatagggagtttcatacaatgaaagtgtgtttttgctaatgaaattggaggggtactatgtatgtgcacatatttgatgtaccctctttaatttacgtgttgtaatggtgaaggtgtgtttattcatacgtgattaggtggtggatgatggataaaaagaaaagagaaacagaagcgggtcatcatatcagcatatctgatttggaaggcaatctcttgaagaaattaactggtaccgatggcatcttgctcctaaaccgaggatgacgtagcatatagaggccaactagaattgcaacgacttggaa

SEQ ID NO: 1561 - DNA, 297 bp, Glycine max
  unsure (1)..(297): unsure at all n locations
  Clone ID: V4R-01-Q1-E1-H8
agagccaagtctgtactggaaattaaattactttgatacaacagaatcaatagctctttccaacaatacaaattatctcaagttcgtacaagggaatgttaagaaacaaaagcaagtcatgcatatactcactgttttgtgagtatttatctctctctctcttcctactcaatgtacaaaatgcttagtgctttgtgaacctctcaaggacttcaaagtagtcgggaaatgtcttcctggtgcaaccaggatccttgatggttactggaacatccccacaagcagcangagagaatg

SEQ ID NO: 1562 - DNA, 386 bp, Glycine max
  unsure (1)..(386): unsure at all n locations
  Clone ID: V4R-01-Q1-E1-A10
tttttagtacaaacactcaaaaatcaaaatcttcattgaacgaaaaactgaatataaactagtgtcaggccgataaaacaatcggtatgagatggaaaattatcattgattccaactacaaacaagtcttcctagaaaactaaacaaaaaatatagcagatagcattatacttagggaagatttgagctggttggcgctccaaaaccaccagatccacgaccaaagccaggccttccaccagcacccccaaaagagggcctgtagtcagcaggagctcctcccttgtctcctccanagttcacaccaggtcctcctcggggaacctcacgggtatcatcacgattcacaccanacctacgctcccccttcaaagcgtggtggaccc

SEQ ID NO: 1563 - DNA, 348 bp, Glycine max
  unsure (1)..(348): unsure at all n locations
  Clone ID: V4R-01-Q1-E1-A11
tttgacaaatagaaagttaaaaatattagaatatttgttgggagcaatcatcatccaaacgacacaatcaactataggtcactggattttcccttaaaatcgaagcttgtgttggttgatatggtacatagtcatttacaattgggctcatttctgaataaattaaataatggatcaagtaaaaagctgtctcgctactttgccttgcatttgatttctttctgtacagttctatcggctcgatgattacaagttggaccacaagctccgataacagcggcttcaaggggcatgcaatttctgtanctggtcaaacacatcataggaactgctgaatggttggaaatc

SEQ ID NO: 1564 - DNA, 360 bp, Glycine max
  Clone ID: V4R-01-Q1-E1-A12
tctcattcgccttggcttcaggataagcctaataagaaaacaaataattccaattcatatatgaacatttttgcctccttatttcttgaaaatgtggaattggaattccccgaggaattccgatctcatttcctttggcttgaggataggcctaataagaaaacaaataattccaattcatatatgaacatttttgcctccttatttcttgaaaatgtggaattggaattccccgaggaattccgatctcatttcctttggcttcaggataggcctaataagaaaacaaataattccaattcatatatgaacatttttgcctccttatttcttgaaaatgtggaattggaattccccgaa

SEQ ID NO: 1565 - DNA, 357 bp, Glycine max
  Clone ID: V4R-01-Q1-E1-A9
ggtgtaataaataaatctatattttctatggatatcgaatgctatccctcaaattattatacagaacttgcatctgcatcaatatattcccctcccactttccccttgtcatcttccaatgccgggccaaaagaattaagaacgccgaaaaaggggtacaaaaaaagaaccagaaaaacaataataaatagagatttaaaaaaataaaaaaggccatttttatacagggcgacgtttaactaaccaagctccagttatatacaatattcgatggtatggcttcactgcaaaacttgttttctctgtccctctttaactggaatcaaaagatcagaacctaagttttccttgtcaacc

SEQ ID NO: 1566 - DNA, 392 bp, Glycine max
  Clone ID: V4R-01-Q1-E1-B10
caattcaatgcttgaagattgtagcattgaaagcattactcataaaacaaaaaaaaataaaatacaaacaactataaggtgtggcacaagtgacaaagagcttgggttctttgactatataataggggtttgatccctgacgatgtgcatagagcagcacctgtaggtaaagaaattgttccttaatcaatactttactttttcaggagattagtcctatggtttctagttgtgagagtacctttgggtccaatctcagatctaaacagaagatatacaaaccacaatcactgaacacatcatttttaaccctttgctaggagagggtgaatgaagtttaatagtctacatgaaacggtttgtattccggtaggtcaagcacgatactggca

SEQ ID NO: 1567 - DNA, 400 bp, Glycine max
  Clone ID: V4R-01-Q1-E1-B11
ttgaacagagaaccttttcaggattatatttgaatgagaaaagtactttgaaaattctaggaaaacacagatggtaacagctgaggctgtttatatacaagttaaacaacttttttttatgtataaaataacaagaatacatacatcaaaagcattcattccccttttaaccgttttcccttatgtctgaaataatttgaagcggcaaagatggaaaaaactgaggggagctgaatccgtcatctcctcctctcttcttgtctgtttcccaaagaatccacacgacactttaatgcctaatgcttgctcaattcaggggcttctttaatgctcatctccaccatttcaactgcattgaaaccttcctcgtcattggctatggttgactgagaatcaatcc

SEQ ID NO: 1568 - DNA, 385 bp, Glycine max
  Clone ID: V4R-01-Q1-E1-B12
tagaagaagtacgttcatggtaaatatatatattcttatatatatataccttacagatacaagacaggagtgaaactcgatttcggtatcaaatcccagataagattaattgacagaaaaagaaacttgcatatgcgacgcaattattctaagccgtacaattattcacactagaagacaagcaagcaacaacatggtagctagataatgatatatgtattctcctatttaattaagtccaaatttttgcttcaaacttgctcttcagggccttcatgcttccaaatagcattaatcggcttaccattggtccaatccctgagcttaagaagcacaggaacaatcatcccaaacaagaatccaggagcagcactggaccccacca

SEQ ID NO: 1569 - DNA, 388 bp, Glycine max
  Clone ID: V4R-01-Q1-E1-B9
aacataaaaaggaatatatttctatcatctaacataaatcgacaatcttctgtacgataaggggctcaaaagaatcacgtataattgaacaatgaatgccacagcagtcaaaacagacagacacatgcatgaatgttacaacagcacgattaagtccactgagtttctgtggtgaggtcaatatatgaatcaaatcgtgtctcgggactcagtagccactattaccgcatcaagaggatcatcaacagtgttagaagcaaggaagtatccaatgaaaagatattcctgaaaccactactgcttggatacactgaacggagataacattcctcgccacttgaaaaataccttagtgggaaaaccatctccatgacctactttgattcca

SEQ ID NO: 1570 - DNA, 377 bp, Glycine max
  Clone ID: V4R-01-Q1-E1-C10
aattcataacatatgagccacaatatttttcaacatatatttctttttctctccgggagcatttcaacaaaacggatctaaaaaaaagaaacaaatcaacctatgcaacccaagaaaaaaaaaaagactataaacacttgatgaatccttgttgtcactgctatacaggttgaccaatttgtcatgatcctaatcctaaaaacatgctcaatcttgtatgttcatttatcggatcgaacccagttcgttatagactaattggaagacaattaccatacggaatgaggatgccgataaaacatgaaaaaaataattaacgagcaagattgaccgaactccaaatggagcttgtaaaggttgctccagcagaacttgat

SEQ ID NO: 1571 - DNA, 169 bp, Glycine max
  Clone ID: V4R-01-Q1-E1-C11
aaaccttaaattgggaggggccacaattaaaattctcaattttagaaaaacaattttcaaatacagtcacaataaaaaagggattttcaccctaaataaaacctaaaagaatctttttccaaattaacccccttaaaacacaaaggcttttttaaacataaaaaccaaa

SEQ ID NO: 1572 - DNA, 361 bp, Glycine max
  Clone ID: V4R-01-Q1-E1-C12
tttttgccaagaaaatataaaaatgtgaaattaaaagttacaacaattataattgtccaaaacacacgccttggattattttagcataaaagtttggtaccaaatacacactgtagtagactgagaagtaaaatcgaacagcattacctcagagcactgccctgaaagtagaacacctattaattactgacaaactaaaacagaaacactagcaatcgggaaagtgcatgttagacagcaagagtgaaacgcattggtttaattttgggagcttcacttccttgttcattaccctttatttggcagctgcttttccttgagcagagatgccacaccatcagaaggattcccaaaattggaa

SEQ ID NO: 1573 - DNA, 284 bp, Glycine max
  Clone ID: V4R-01-Q1-E1-C9
gaccaaaagaaaagaaactagggaggaccaaatatttactaggcatctaaatcaaagcttcaatatacaccctaaaacaaccaaattgctgggcaatcaccttccatgcccaaaaagcttactcaaagatgcacctaaatcaatggctttcgggtggatccgttgaataagtacaacttcaaattccttttgtgcttaatgattttacactcaagtccaccaagatatgaagaaattgaaatacctccaaaatgaaccactacatgttcattgggaaagtgaaa

SEQ ID NO: 1574 - DNA, 353 bp, Glycine max
  Clone ID: V4R-01-Q1-E1-D10
agttagtgcttttgtcgcaaggaacaataacattccttgaattctatttccacaacaggcatctaatactttattaaatggggataccaaaaaagcatgaagccactaataaccataacgtattcaactgaaatcagagaagaatggaatgtcggtggaactcaaccattcattcccttgaatgaaattgcgaactgtgaactggtttgcctcagtggcgttcttgataaccctataaccaggccacgtaactcttgcacttgtgtttgaaccgggacccctattgttgtactctccataatacaacgtatccaatgcaaacgtgccattccactccaaccaccctttggggt

SEQ ID NO: 1575 - DNA, 52 bp, Glycine max
  Clone ID: V4R-01-Q1-E1-D11
gaataaacattatcaagtcacatgatcttttattcaacttatggaaaatgtt

SEQ ID NO: 1576 - DNA, 274 bp, Glycine max
  Clone ID: V4R-01-Q1-E1-D12
gcatgaaaaataagagaagtgatgtctcattcagcagaggggagggtgcatgcatagtatatctatacagaaactctattttgcattcaatttgcagcacttgtagaagtaatacaagataaataaaattgttcccaccatttaaagaacatgtacaaccaaatggacactactaaattttaagaatatgtcagaaatttggttgatagcaaagcagccaacaaaggaaactcccactgatccatcagaaaagttgaataaccaataatttaag

SEQ ID NO: 1577 - DNA, 396 bp, Glycine max
  Clone ID: V4R-01-Q1-E1-D9
tgggggaaaactgataatctcttaatttatcattgtacactacagacaatgagaaaagaatatgtatatactttaatgtgggcgagactccgaggtgcatgagttgagttcctccaagtgagaaaacctgaaaaaaaaaatgccataagctcatctcaatctggcagtacaaagttatgtttgctacacgtctccagcatatcttgtccggctaagatcccactggagcacttttagccttggcagcagcagcagtacctgtagctgcggctgtggtggcggcggcagctgctgcagatgcagcagcagatgccgggttgctagatgatggaagcactgtgttggattgtgaactgttctgagcttcaagtgtttggggctgctgccgctgcatct

SEQ ID NO: 1578 - DNA, 291 bp, Glycine max
  Clone ID: V4R-01-Q1-E1-E10
gcatccaagtaacagtttattattacactctgcagggctgcattattctctaaagggatgagccagagtatgtcacatctccaagttcatataatcgccgacaagaaaacttacacgaaacaatacaagttgctaatggtcaatcctggcaccagacgctacccttgaaattcattaaacccttttgaaactttgatcgcttcaattatatagataaataacaaagaatgaaatatgatcgtaatgtacaatatcttcttcaaatcctgtttgcattggcattattgctgt

SEQ ID NO: 1579 - DNA, 404 bp, Glycine max
  Clone ID: V4R-01-Q1-E1-E11
aaaacctgaatcaacaattatttttaaacacaatatcctcaagacaatagttacacacaaaaaaaaaaaagcactacgttcgtagcctatggagttttaccattttttttttaaaactctgcttttatctaactgaagctagtaggcaaaattaatcattgacgaccatggcatccgcatcagggctgtccaacttcttaataagcagtttatttagaggagaacgttctttgcctgatagagtcacatcagcatcaacaatgattgagtcctcttctttgaaatctccccttagaactcccatagcaatttcattttcaaccaattgctgtatcactcttttaactggtctagctccaaaatttggatcaaaacccagtacaccaagaagtttaacagctttt

SEQ ID NO: 1580 - DNA, 294 bp, Glycine max
  Clone ID: V4R-01-Q1-E1-E12
aaaagtaaataattatttaacaggaaccctaaaaaaataacacaccgtggaagcatttctcgaaagataatttgttaaatattttacaacgatcaagaccattacagaatttaatccacttttccttaaagaaaaaaaagaatttctaaattacatcttttgttttttgctttttccctctttattgaggtgtaacactaccaaactaaactgaataacattatccataaaatgcccaaaccgaaaatttcactttggccatcgtttttgtgccgtcttttttttttcccctta

SEQ ID NO: 1581 - DNA, 270 bp, Glycine max
  Clone ID: V4R-01-Q1-E1-E9
actaaaccaaagcaacaaaacgcatcaaattcctgaaacacgcgtgcgcctaagaaaaatgtaagcaggggttccgactaacccaacagagtaatgcacagattagtaaaagcaattttgcaacagtcaataactaacccatttctgggaatcataattactacattatggcggagactgcatacttcgaccgaaaacaatgcaacttagactccaagacacttgactacagaacatacatcatacacctaatgtcacgaacatcacctg

SEQ ID NO: 1582 - DNA, 363 bp, Glycine max
  unsure (1)..(363): unsure at all n locations
  Clone ID: V4R-01-Q1-E1-F10
aaaataaaatctgatgcataaacgaatgagtttcattacatgatcaccttagcctaacaggttcctcattgagagtctccaaaacaggcttccttgacctacaataatttaacctatactgaaaccctgactccactccttccaaactcaaccttggaatcacacttaaactttcatcttttgaactctcttcttcttcttcccgttgttgccatgctttgccgccacagttgtccggcagaacacgcgccttactgccggacaatcttttggcggcagagttggcggccaagaaggaattctgccatgtcaggggcggtgacaagagaattcactctcctcatcnggaagaagatatacacg

SEQ ID NO: 1583 - DNA, 288 bp, Glycine max
  Clone ID: V4R-01-Q1-E1-F11
aacagcaatgtaaaaaaaagcgtcttatactgtgcatctgtgtcattgacttttccctcctagtatttaggcatttttggaatgtccaagtcataaaccacgtaagtggaagtgtggaactacaaaatttctgaaactaatctatgtacttagcttatttgatttcttctagcactgttggattttgagtcaattcgaactgtctttgctgacatgcagtggcgcacatggatttgttgacatgaagtttggacggaagaactgccttgtacatgaacaaccagaatc

SEQ ID NO: 1584 - DNA, 336 bp, Glycine max
  Clone ID: V4R-01-Q1-E1-F12
gcatgcaaatgattaaaggttttattaagaattttttttattcagaagaagggaactcaggtacagtttacgacaacttattaagaatttgattgcatgcatgcaatcttccttggtaatatgcttggatgggaatgactaggagaggttgtgccttatgcaaagtaatcccatatttctcagacatatccatgtcttctggcttttgtccatccgtgagcttccaattataattgtatagaagaaaagccaacacaatgtgcacagttccaaaaaccaatggcaaaccaagacaaatccttcctccaactccaaagggtaataacccaaaatcct

SEQ ID NO: 1585 - DNA, 345 bp, Glycine max
  Clone ID: V4R-01-Q1-E1-F9
cagtaaggaactcaaattacgctggccatggaccaggtggaacagttgcagagtgtttaggggtgatgcatccaacgttctcaaccagaaagtacaaaatgtacatcctcttgcccttttccccttatcaaataacacaacttaaaaacaggggggcagtttggccacagacattgaccgtagttcatctcacagtcggcaacattaaaatggaaggaacgaataacctgatacattttcatacccaagaaatggaaaattttgttgtttggcattgccaagagttcctaaattattaaatttagcaattacaaaacacaaatggattaacatgagaacagggct

SEQ ID NO: 1586 - DNA, 292 bp, Glycine max
  Clone ID: V4R-01-Q1-E1-G10
gggttgttaaccccatcaaaaacccgacccacccaaatttaacttcccaaaggcaaaaacaaagtaaaaaacttcccacaaaaaacaaaatttccaccaaatatcaaacccccaaagcaaaaataaagcacccccccccacactggacaacctttatcaacaaaccacaaccctcaaaaaatttcaaaaaacccaaaaccaagtgacaaagactcccccactggaaaaatttttaaacccccaagggaaaaaacccccccccaaaaaaaaaggtttccaaaaataacccttg

SEQ ID NO: 1587 - DNA, 256 bp, Glycine max
  Clone ID: V4R-01-Q1-E1-G11
aaaaaaaaaacattaaacatattccaaaaataaaagaaattttaaaatacccccaaaattataataaccaaaaatatgaggttagtcaatgaaaatgaatcggtaaacaaatttctctgggcatcaaatacagatatgggaaattttaaaaaaaccagttaaaggaaagtgcctatcgaaaattttataaaataaaattttctaccaaatgtcaaaaaaaaattaaatggttctcaaaagtcctcccccaaaattt

SEQ ID NO: 1588 - DNA, 359 bp, Glycine max
  Clone ID: V4R-01-Q1-E1-G12
ttgccatacaaatttgaaactgtaaattagccaacaaaaacaaacatacaattcctcatcatatcatatctgttgctgagggattgaaaaacagttcctccccctctttaacagaaaccatttgcaatcaatatattgtctccaccctctctctctctctctctagaagaaatcaaactccagataattatcagaacctttctgattagctattgagatatggttagcagccttttcaccaccacttgatgaagctggtgagggtatcttctcaaactctacagccttggggatctcgggtggggtgggacatctgattaatgcccaattcacacctttcaaaaaaaggttgtgcttga

SEQ ID NO: 1589 - DNA, 364 bp, Glycine max
  Clone ID: V4R-01-Q1-E1-G9
tgagctccgtcattataaatatatagaacgagaaaaaggcatggactagaaaccaaaaatccaaattcgccctcagacacagaataaacgttatctagtaaaaattatgccacatctcaaaagttgtatccttcctaactcaaatccctgttagttttgaaaaagttcaactacattcgaatggagaaaagcaaaaattcttaagctacaacaaaaagctagatccttcagccaaaatttcacaactacttcctcgtgctctctcaaactcaaacctagtctgttacaggattctgtaatccatatccatgatagagtcttgtgtgtggctgaacgtgaaaaattgctatctacttcctcctct

SEQ ID NO: 1590 - DNA, 298 bp, Glycine max
  Clone ID: V4R-01-Q1-E1-H10
gtgtaacggggtgaacaaaaaaaaaacaaaccctaaaacttatccaatttaaaactgaaaaaaacacaacaatttccaaaaaagttccaatagacaaaaaaaactttacataaaaagcatcaaaccaaagaatttacaattaacctgacttctaaaaattggccaatttaaagaaatccaaatcaaatggctgcctgtcacaacggattatttcaaaacacaaccccaaatgtgtcccccccactgtaagtcatatataaaaacccatcttcacccttgttttccccaaaaattgcaa

SEQ ID NO: 1591 - DNA, 297 bp, Glycine max
  Clone ID: V4R-01-Q1-E1-H11
tataaataaatgaattgaattgaattgaattgccactgtcaaaagtacaatgactacaatctaaaagctaaaactagcgaataaggtccaagtactatatatgtacaagaacaaattaatctcaaataactttaaaaaagaaagaagaaaaaaacactgaatattttttggatctatggatcatcagtattgagggatttcaatcttgggtatggtcaaattgagacgggatttcttggatggatgaggactggtaacctcgtcatcaacgaagaaccttgttgaaaagtccggaaa

SEQ ID NO: 1592 - DNA, 362 bp, Glycine max
  Clone ID: V4R-01-Q1-E1-H12
ttcaacagtaactggttttaaactatatctctttatactggaaatacaggtacaagtggataacatgccaccaatatataaaaaagactggaaggcaatgtaatgtgttacctgggggaagtaacttcttgctgaaaagcaataaaagaataatttgaagaatcagcagttactacacatttcacaacattagaccggaggtcatcatactttcttgcatcggtcgcagaaatactatatatgcctaaagaacaaagggcaagactagtttcaagagtgctgatataggtggtacaacagtcccactgctgccaccactggtgtggtcctcaaccgtacttcacgaacagaatttaatctgg

SEQ ID NO: 1593 - DNA, 340 bp, Glycine max
  Clone ID: V4R-01-Q1-E1-H9
aaatcaaatttttatatattgaatgatacatatacagtattgggggagtttttcaataaatatacaaagcatatatttgattttattcattataaaattggcttcacaaccccttgcaagcgcagcaggttgcaaaccaaaatgcattcatgtgatatcattcaacgacagagacaaaagcagtgccatacaactgtctaaaaccaaagtaattaataattcataaacaatacaaacgaataataaagggattgacacttcgtttttcttaggtgacaaaatgcacggaaacttggcttccgttgttttccttgtgcaattgcaaagtgcatcttcctgc

SEQ ID NO: 1594 - DNA, 402 bp, Glycine max
  Clone ID: V4R-02-Q1-B1-A1
gatctcccttaacggaagaagctagggttcggattgatttctctgctcataataataataatctgatttgcttttcggaaaataattttgctatggcaaactggagagaacgagatttgtttcacatcgacgagatcgatcccgtggacgcgtcgaacggcgaagatttcgacgattcttcgtcggtagacagtgctacttccgatggttcgaggacgcaggttggacttacggagcgtttgacggatattctcgttgacgagcgcgacggcgatctgttgattcagcagactaatagagaggaccggttgttgtggtggcttcaggctctcgatatgcaagttatgggagcgtgtcgcgccgacgagcggttgaagcccttgctgaagatgaacgcttcct

SEQ ID NO: 1595 - DNA, 368 bp, Glycine max
  Clone ID: V4R-02-Q1-B1-A10
aagttgtttgttttctttgttgctgcagtagttttggtagcatggtcatgccatggcgcatgctaccaaaggttccctctccgaatgaggactggctatggtgagcgttcttcggaggtaaaatgcgcaagttttaggcttgctgtggaagcacacaacatccgagcctttaaaaccattcctgaagagtgcgttgaagcaacaaaggactacattaatggcgaacaatttagatcagactctatcacagttaaccaacaagctttcttttatgccagtgaactcgaagtccaacacaacgacatatttatattcggcataggatacaccgtactctctaatatcccatactatgaaaaacatggata

SEQ ID NO: 1596 - DNA, 404 bp, Glycine max
  Clone ID: V4R-02-Q1-B1-A11
atcaaatctttttggaacatagcacaacaattttcagctctgtacaacgttggatttggttcagttatcgtgtgaggaatattagagcatagaaacatggtggctgaagcagaggttgtgtgtcaacaaaacgtgggtgtgttggatgtgaagcattttccaaataaggtaagcgatgttcacgagatcggagacgcagatgctaattcgcctccgagttttgaccgagttcgtgccactgagtcggtctccgccgagttactcacttcacaagaagatgttaagtctgcagacaggatctcagatgctgctctagaatctgcggttctgcaatttatcccatgcatccgttctggtagttttgctgacattgggccacggagatacatggaagatgaacatat

SEQ ID NO: 1597 - DNA, 399 bp, Glycine max
  Clone ID: V4R-02-Q1-B1-A12
agagacagagacgcagccatggggcggagacctgcgaggtgttataggcaaattaagaacaagccataccccaagtcacgtttctgccgtggtgttcctgatcccaagatcaggatttatgatgttggtatgaagaagaagggtgttgatgagtttcctttctgtgtccatctggttagttgggagaaggaaaatgtttcaagtgaggccctggaagctgctcgcattgcttgcaacaagtacatggccaaatttgctggaaaggatgctttccacttgagagtcagggtgcacccattccatgttcttaggatcaacacgatgctttcgtgtgctggtgctgataggctccaaactggaatgagatgtgcttttggaaagccacaaggtacttgtgct

SEQ ID NO: 1598 - DNA, 378 bp, Glycine max
  Clone ID: V4R-02-Q1-B1-A2
aattttacaagtggggagagagagatttgttctggtattgttttgatcctcggtcaaaagaacacgcaaagcaaacccagtcacccccaacaaacacgagacaagccgtgtgcaaacaatagtcggtgtgaacccccaaaccctaatcgccaccacctccaatccttcgtttctatgaccgagtgctgttggggtcagcatgcgctagcttcgtcgtcgattttttggttggtgattctcgtgattcttttcgggcagaatttttgggtttgacggcatggatttggtaccgagcgtcaaggaaaaattaaactattttcgtataaaagagctcaaagatgtgctcactcagttacacctttcaaagcagggaaagaa

SEQ ID NO: 1599 - DNA, 405 bp, Glycine max
  unsure (1)..(405): unsure at all n locations
  Clone ID: V4R-02-Q1-B1-A3
gggggaggcaagagatgctcttggggccatccgggttcagaatatggcatccaacaggatggtccttgcaattcatttgcaagggggaaaacaggtctatgtgcacttcatagtgggctagtgcatgacaagagggttcatggaggcatctcactgggatctgttgttcaggatcctcattccagtaaaacagatgaactaaagcaggtactcgttgacaaaaacatgggtatagatatgatgaaaatagggagtagtctaggcactgcaacctgttccgacttcgaacagtttgaagctgcaactgctcatgtctcagccaaggaaggtagtcacttgccagtgtcagttgctgttcctgaaggcanggtgcatggtggtagcctgatggcaatgctaacgggg

SEQ ID NO: 1600 - DNA, 414 bp, Glycine max
  Clone ID: V4R-02-Q1-B1-A4
cggctcgagctcgagccgaaagaaggcgtcttcataaacgcctttattctccgtttccgtttccttcccggaattcgatttttcatctctgaaaatgagagagtgcatctcgatccacattggtcaggccggtatccaggtcggaaatgcttgctgggagctctactgtcttgagcacggcatcgggcccgatgggcaaatgccaagtgacaaaacagttggcggaggtgatgatgctttcaacactttcttcagtgagactggtgctggaaagcacgtgccacgtgccgtctttgtagatcttgagcccactgttattgatgaagtgaggaccggaacttaccgccagcttttccacccagagcagctcatcagcggcaaagaagatgccgccaacaactttgcccgtggtca

SEQ ID NO: 1601 - DNA, 416 bp, Glycine max
  Clone ID: V4R-02-Q1-B1-A5
atgggttcaacaggtgagactcagattactccaacccatgtatctgatgaagaggcaaaccttttcgccatgcaactagccagtgcctcagtactccctatggttctcaaatcagctcttgagcttgatctgttggaaatcatagccaaggctggccctggtgttcacctttccccctccgacattgcttctcggctcccaacacacaaccctgatgcacccgttatgttggaccgtatattgcgcctcttggcttgctacaatatcctctctttttctcttcgcactctccctcatggcaaggttgagaggctctatggtctcgcccctgttgctaagtacttggtcaggaacgaagatggtgtctccattgctgctctcaacctcatgaaccaggacaaaatcctcatggaaag

SEQ ID NO: 1602 - DNA, 385 bp, Glycine max
  unsure (1)..(385): unsure at all n locations
  Clone ID: V4R-02-Q1-B1-A6
aaaaggttgtgcgtgtctgggatgcaagatcaggatcaaagactctaaagctaagaggacatacagataacatcagggctctgcttctggattctagtggcagatattgtttatcaggatcttcagactctatgataaggctttgggatataggtcagcaaagatgtgtgcattcttatgcagttcatacagattctgtttgggcacttgccagcaccccaacatttagtcatgtttatagtggagggagagacttttcattatacttgacagatttgcanactagagagagtaatttgctttgcacaggcgagcaccctattcttcagttggctttgcatgatgatagcatttgggttgcatcaacagactcttcagttcatag

SEQ ID NO: 1603 - DNA, 417 bp, Glycine max
  Clone ID: V4R-02-Q1-B1-A7
actagctcggtttgcgaggaacgagttcagcttggactccaagtccaccatcggtgttgaatttcagacgaggactttggttatcgatcacaagaccgttaaggctcagatctgggacactgccggccaagaacgatacagagcagttacgagtgcatattacaggggtgctgtgggggcaatgttggtttatgacatcactaaacgccaaacctttgatcacataccacgttggttagaagaactgcgcaaccatgctgacaagaacatagtcatcattcttacaggcaacaaatgtgatcttgagaaccagcgtgacgtacccactgaggatgcaaaagaatttgctgagaaagaagggttgtttttcttagagacctcagcactagaagcaactaatgttgaaacagccttcaa

SEQ ID NO: 1604 - DNA, 411 bp, Glycine max
  Clone ID: V4R-02-Q1-B1-A8
cttcctttcccattcttcatcttcttctctctgaaccgtactcaaactcactttcccacttatttatacaatgtcggcttacaaagaccaggatccccgtcttcatggcatcaaaactaagattcgtgtcgtccccaatttccccaaatccggttcctttttctccctttcccttttaatcttctgttttctttaatgttttgtttttagactaagaaaccaacccgcgaggctttgaattcatgttttgtttgacttccgtttccaatttccagaaagtcttcttcggaggtttctttttctttttttttcattttcactttagcttggtagctaatgttttttattttattttttgcaacggcaggtcttatgttcctagacattactactctattgcttgatccaaag

SEQ ID NO: 1605 - DNA, 391 bp, Glycine max
  Clone ID: V4R-02-Q1-B1-A9
cgcggtgtgagtgagacggagagtgctaagcaatcgtcttctcttctcggagcttggctttgcttatcgattctctctcctctcgtttctcgaattcgaaggtttgtaaaagatggcagatgccgaggatattcaaccccttgtttgcgacaatggaactggaatggtcaaggcaggatttgctggtgacgatgctcctagggctgtctttcccagtattgttggccgacctcgacatactggtgttatggttgggatgggtcaaaaggatgcctatgttggtgatgaagcccaatcgaaaagaggtattcttactctcaagtatcgcattgagcatgggatagtcagcaactgggatgacatggaaaagatctggcatcacacattttta

SEQ ID NO: 1606 - DNA, 400 bp, Glycine max
  Clone ID: V4R-02-Q1-B1-B1
agttccctcagttctttactgggaaaagacgaccctggagagctttcttgttgtatggacctcctggaacgggaaaatcatatttagccaaggcagttgcaacagaagctgagtccacgtttttcagtgtttcttcatcagaccttgtttcaaagtggatgggtgaaagtgaaaagctggtttcaaaccttttcgaaatggctcgagaaagtgccccttctatcatatttattgacgaaattgattccctgtgtggtcagcgtggagaaggcaatgagagtgaagcttcaagacggattaaaacagagcttctggtgcagatgcagggtgtaggacacaattatcagaaagttcttgttcttgcagcaacaaatacgccctatgctctagaacaggcaat

SEQ ID NO: 1607 - DNA, 368 bp, Glycine max
  Clone ID: V4R-02-Q1-B1-B11
aggaaatgcagaggcctggtaccccactttacaacatcaaagcatacctccctgtcattgagtcctttggtttctcgagcacattgagggctgcaacatcaggccaggctttcccacaatgtgtctttgatcactgggacatgatgtcttctgacccattggagactggatcacaagctgcacagcttgtcaccgacatccgcaagaggaagggcttgaaggaacagatgactcctctctccgagtttgacgacaagctttaaattgtttgaactatttaacttacttgtgaacttagccgaatttatttctcatatgaacaatgttactttagatttaagttttggtcaattttggttgggggtttg

SEQ ID NO: 1608 - DNA, 373 bp, Glycine max
  unsure (1)..(373): unsure at all n locations
  Clone ID: V4R-02-Q1-B1-B12
caagcgcccaattagctctgggagcagcttttggacttgtgcctccaaaagagcaggttgacgtggagatagcaacccaaataaccatctctgatgacggcccaaaacgaagtttgttgtatgtggagacagctgatcggcctggattactggtggatcttgtaaagactattacggacattaacattgccgttgaatccggagaatttgacactgaggggctcttggctaaggcaaagtttcatgtcaactacaatgataaagccctcatcaagcctctccagctggttcatgttaacagcttgagatatttcttgaggcggcctgagactgangaatccagtttttaagtgcaacacatcatatttgcctc

SEQ ID NO: 1609 - DNA, 371 bp, Glycine max
  Clone ID: V4R-02-Q1-B1-B2
cgttgttgtgttgtgtgctgcaacacaatcggtggtctgagaaatcttgtttgtgttgggtttgttatggctcggagagcagaggaagagtacgattacctgttcaaggttgtactgatcggtgattccggtgttggaaaatccaatcttctgtcccgattcactcgcaacgagttttgcctcgaatccaagtccaccattggagtcgaattcgccactcgcactcttcaggtggagggaagaactgtgaaagctcaaatatgggataccgccggacaggaacgatacagagcaattaccagtgcatactacaggggtgcccttggagctcttctagtctacgatgtaactaaaccaaccacattcgaaaa

SEQ ID NO: 1610 - DNA, 389 bp, Glycine max
  Clone ID: V4R-02-Q1-B1-B3
ggggtagagaatgagtccctaatccacatggacgttgatcaaatcttcttgcctgttccatctcctgttaaggcagctatttttgaaagttttgctagacaaaatatgtctgaatcagaaactgatgtcacagcaagcatcaaaggatttgtcaagagtaactatggttttccaactgatagcagcaccgaatttatatatgctgacaattcaaaggctcttttcaacaagctggtcctctgctgcatcaaagaaggtggcaccctttgttttccagccggattaaatgggaactatgtttcgtctgccagatttttgaaagctgacatagtgacagtacctaccgatgtcaatgtaggatttaagttcacagaaaagacactcactgg

SEQ ID NO: 1611 - DNA, 377 bp, Glycine max
  Clone ID: V4R-02-Q1-B1-B4
ctcgagccgaatcggctcgaggtgccgccgtcaccgagcgtgtccttgcagcatgctacaaggctttgaatgatcaccatgtccttcttgagggtaccctattgaagccaaacatggtcacccctggatcccaatctgctaaggtttcccctcaggtggttgccgagcacactgtcagagcccttcagagaaccgtgcctgctgcagttcctgctgtcgttttcttgtctggtggccagagtgaggaggaggcatccgtcaacctcaacgccattaaccaggtcaatgggaagaagccatggtcactctctttctcctttggaagggcacttcaacagagcacccttaaggcatggggcggaaaagaagagaatgtg

SEQ ID NO: 1612 - DNA, 363 bp, Glycine max
  Clone ID: V4R-02-Q1-B1-B5
ctgacactgcacatgttgccacaactcagttgcatttagcctggcatatattataactgtaatgccaatccggaattcaattagatgtgtagtcttgtgacaacttgtgaaattttcggctctgcaatcaggcacgctatgctagttcagttactaagctgaactgtttctactacggaaagggaaatttcaatcggtactcattaacttgctacttggatattgcaaatgtaccgtacgcatcaagacatacgtgaaggacattcctcataaattacatcatcatcatcaggatatatctcatatcaaacaggtacctggttacgtggatgactatgcggcactacttgaggtgaaatcttt

SEQ ID NO: 1613 - DNA, 406 bp, Glycine max
  Clone ID: V4R-02-Q1-B1-B6
cgccttcgcattcctctcgccggattctttcgcatacgacgccgtctgccgacgtttctgccggcgaatccccgccgtcgtcgtctccgtcaactaccgcctcgcaccggagcaccggtacccttcccaatacgacgacggcgaggatatcctcaggttcctcgacgagaaccgcgcggtgctgccggacaatgctgacttgtcgaaatgcttcctcgccggcgacagcgccggcgcgaatttggctcacaatgttgcggttcggatcggcaagtcggggctccagttgattcgggtcgtcgggttggtttcaatccagccgtggttcggcggggaagagcggacggctgcggaggttaagttggacggggcaccgctggtatcgatggcgaagacggactggctg

SEQ ID NO: 1614 - DNA, 410 bp, Glycine max
  Clone ID: V4R-02-Q1-B1-B7
agcgagccaggtagggttttcggtgttcccctctttgtgttcgttcgcgacgatggggtccatccccgatccaggcgagttgagcgagttgactcagccgagcttcgacgagttccagcgccaaacctctctcatgaccagctgcaccctcctctggaaggagctctccgaccacttctcctccctcgagcaagacctcaaccacaaatccgaagccctcaagcgcaagattcacaccctcgacaactccacctcggactccctccgcctcctcgaccaccgcgaaacctctctcgacgccactctccagatcgccctccggcagctcgacacgcgccgcaccgctgctctctccgccctcctccacgacgctgacgacacctcccccggacgcgaggtcgatgacaccg

SEQ ID NO: 1615 - DNA, 391 bp, Glycine max
  Clone ID: V4R-02-Q1-B1-B8
cctttccttattcttcttctgtttcatccctctccccattttctcgctctcgtttcttgtcctctactcctttctccatggcttctgattcccctttccctgtcaccgctcaaaacatcaaccccaaggttctgaaatgtgagtatgctgttagaggagaggttgtcacacttgcccagaatttgcaaaaggatttacaggccaatccaggttctcacccatttgatgagatactttactgcaacattggaaatcctcagtctctgggccagcagccaataacttttttccgagaggttcttgcattatgtgaccatccagctatattggacaaaagtgaaacacaaggtttgttcagtactgaatcaatacagcgagcatggcagattgt

SEQ ID NO: 1616 - DNA, 388 bp, Glycine max
  Clone ID: V4R-02-Q1-B1-B9
tcttttcaaccactgaaaaggatgaactatacctcaatttggtacttgaatatgttcctgaaacagttaatcgtgtgatcaaacattacaacgagttaaaccaaaggatgccgctgatatatgtgaaactctatacataccagatctttagggcgttatcttatattcatcgttgtattggagtctgccatcgggatatcaagcctcaaaagctattggtcaatccacacactcaccaggttaaattatgtgactttggaagtgcaaaggttttggtaaaaggcgaaccaaatatatcatacatatgttctagatactatagagcacctgagctcatatttggcgcaactgaatatacttcagccattgacatctggtccgttggatg

SEQ ID NO: 1617 - DNA, 410 bp, Glycine max
  Clone ID: V4R-02-Q1-B1-C1
gaagtttcctctcttagaggagagttgcaacaagtaagagatgagcgagaccggcaattatctcaagtacaaattttaagttctgaattagagaaagttaaagaatctacaaaacattcctccactgaattggacagcttgacgtttaaagctaatgatctggaggaaaaatgttctctgaaagataatcaaataaaggcattggaagagcagctagcaactgcagagaagaaactgcaggtgtctgatatatctgcatatgagacaaggacagaatatgagggacaacagatatttgtgaatgagttacaaagacgcttagcagatgcagaatataaacttatagaaggggagaggctgcggaaaaaattacataataccattttggaattaaaagggaacattcgtgt

SEQ ID NO: 1618 - DNA, 390 bp, Glycine max
  Clone ID: V4R-02-Q1-B1-C10
actggatcttctgggtgggacctttcattggtgctgcacttgcagcactctaccaccaggtcgtaatcagggccattcccttcaagtccaagtgattcaatcaaaccgttcatgcttaatcaagttgggaacaacaaaaaaaatcaaaacaatgtttctgggtttcggtttcatttcatcaagatgatctgtttatctttttttttttaattttaatttaaagtctttgtattttgtatgtaaagatgtaaaattatgattattaggtggtgcatgtgttgcgtcatgggccaatgttatcccctgcttttaagttggaagaggcccagctcacgtgtgaggtacggctgtgattgtgtaatttgcaaaatcaaaaataacccccgagtc

SEQ ID NO: 1619 - DNA, 406 bp, Glycine max
  unsure (1)..(406): unsure at all n locations
  Clone ID: V4R-02-Q1-B1-C11
ttcagacaacgcaaccttaactttcccacatacgctaactcaataaccctttcattccgttcattgctctttccagattctattttgcctcttagaagttggaatagagaactagagctgggtggatggaggatgacaagaggaggaggaagaacaagaagaagaagaacaagcagaacaagaatgtggaaaatggggtgggagaaactgctaatagggatcagaatctgctgagtaatggaaaggatgagcatactaatctttccaagactgcaaatgagcaaagctcgaatgtcgatttgaatggggttggagagacattaagtagggatcacaatctggtaaataatggtaaggatgaacctgctaatctttcaggagtcnctgatgagcaatgcatggatgc

SEQ ID NO: 1620 - DNA, 329 bp, Glycine max
  Clone ID: V4R-02-Q1-B1-C12
ggccgttgagtcgctcgtcttcgcaccatttttcgccactcacggtggcctgcttttcaagatcttttgatttgagggtacagttttcgagcaatttatcctatttttctcggagcctgcagcatgcatttttctttgtaccaatataccctctccacctttaggggtagctcttctaattatcaggacttgctcgtcaaattatcaggacttgaaatttgttactaaatgtactagcttttcgatttttcacccagttttatatgataattcgtaatttaattatgaatcaattattacatattataccacttataatatgacacagt

SEQ ID NO: 1621 - DNA, 397 bp, Glycine max
  Clone ID: V4R-02-Q1-B1-C2
ccaagtcccacatgtggcattgttatagcatattttgctgatacacagctctatgagtttgtgagtagaaacaacaagctgaaggggcttggtaaacccgtggtttcggtccttgacagtggcttgtggtattactgccgacatccgaattactttggcgagcagctgtggtggtgggggctggttgtgtttgcatggagcctgggagtgggatggaccttcattggagcttttgttaatactatgtgtttggcttatgtgactaggcttgtggaggaccgaatgttgaaacaagaaagtagagcagaagcatttagggtgtatcagaatacaacttctgtgtggataccttggttcaagtcctctccttcaggggttaaaaataagaatgcctgat

SEQ ID NO: 1622 - DNA, 402 bp, Glycine max
  Clone ID: V4R-02-Q1-B1-C3
gaaaaagagtctcaaatttctgttaattttagttttcgtttcgtatcacgcttttcatcttccttcttccctcactttctctccctccaaacagcgtgcaattcttcttctttctctgcgatacatggagatgtcgtcaatggaggattcgcgctcctacgagattctctccacggttctcgacgctttcctccgacgcggacgatctccacgattaccgaacagttctataccgattgccccacgaatatctccttttacgccctcgttttaaggtcctttcttcgctctccatatctattcgtttatttcgctgtttatgctcggaattccaacagtaggatatcgttgactcgtgatttccgtttcattcgtcaatcatgtgttgttagtgacttagat

SEQ ID NO: 1623 - DNA, 407 bp, Glycine max
  Clone ID: V4R-02-Q1-B1-C5
ttatcatcgtcacaagctctctcatgaaggatatgaacagcaagattgatatgtaccgagcaaatgccattcgagtgctgtgtcgtatcactgacggaaccctcctttcacaaattgagaggtatttaaaacaagccattgtagataaaaatccagttgttgcaagtgctgctctagttagtggcattcatctactccagacaaatcctgaaattgtaaaaagatggagcaatgaggttcaggaagctgttcaatcaagagcagcccttgtacaatttcatgcactgggtttgctgcatcagatacgacagaatgaccggctagcagttagcaagctggttaccagcttgaccaggggaactgttcgctcacctttagcgcagtgccttttgatccgttacacaagt

SEQ ID NO: 1624 - DNA, 399 bp, Glycine max
  Clone ID: V4R-02-Q1-B1-C6
cttgttaggattttcgcagagctatcacgcaacttctcggatctaatgaacaagccgcagtacaggactcttttcagcaatgatgcatcccctgttgatgaatcagcgcttcgccaattggagaaggaagtgaaggagcgcattaagaccacccgccaggtgattggtgatgccaaggagtcctttgataaccagctcaagattcaaaagttgaaggatacaatcttcgctgtgaatgagcagttaaccaaggcgaagaagcagggtgcttgatggaagagaggattgcccatcctgaaaagtattcaactgaggggaagccggttcctccagaagttgaagatcctaacctgtaccactatgccttgttctctgataatgttgttgccgcatctgttg

SEQ ID NO: 1625 - DNA, 404 bp, Glycine max
  Clone ID: V4R-02-Q1-B1-C7
gtgaagctcaggctcaggattggagaggcagaccctccaaccctgccaaacacggtggaatgattcccgctgcttttgttcttgggttgcaagcttttgagataatggcaatagccgcagtggggaacaatctgataacctacgtgacgagtgagatgcacttccctttgtccaaggctgccaacctagtcactaactttgttgggaccatctttctcctcgccctcctcggcggctatctttccgactcttacctcggcagcttctggaccatgctcatctttggtttcgttgaactttccggtttcatattgctttctgtccaagctcatgttcctcagttgaagccacccccatgcaatatcaacgatttaggagaacagtgctcagaagcaaagggcatg

SEQ ID NO: 1626 - DNA, 408 bp, Glycine max
  Clone ID: V4R-02-Q1-B1-C8
ttatcatcgtcacaagctctctcatgaaggatatgaacagcaagattgatatgtaccgagcaaatgccattcgagtgctgtgtcgtatcactgacggaaccctcctttcacaaattgagaggtatttaaaacaagccattgtagataaaaatccagttgttgcaagtgctgctctagttagtggcattcatctactccagacaaatcctgaaattgtaaaaagatggagcaatgaggttcacgaagctgttcaatcaagagcagcccttgtacaatttcatgcactgggtttgctgcatcagatacgacagaatgaacggctagcagttagcaagctggttaccaacttgaccagcggaactgttcgcccaactttagcgcagtgccttttgatccgttacaaaagtc

SEQ ID NO: 1627 - DNA, 406 bp, Glycine max
  Clone ID: V4R-02-Q1-B1-C9
gtcttaccggtgtcaacgaggtggcggagaatggaaaacgccgacgttttcttgggcttacacgacttcctcgagcgcatgcggcaaccctgcgccgctgaattcgtcaaagcaatcaaaagttttattgtttcgttttcaaacaatgctcctgatcccgatagggacagtgctgcggttcaagcgttcctcgcgaaaatggaagcggatttcagggctcatccactttgggctggttgctccgaagaggaacttgaaagtgccggtgaaggacttgagaagtatgttatgacaaagttatttgctcgtgtatttgcttcacttccagatgatgtaaaatttgatgaccaactttctgagaagatggctttgattcaacaatttattcgacctgaacatttggata

SEQ ID NO: 1628 - DNA, 398 bp, Glycine max
  Clone ID: V4R-02-Q1-B1-D1
cagagccagcgagagcaaaaccctagttcatccatcaccagtcgaggaagaagatggtgaagttccttaagcccaacaaggctgtcatcgtcctgcagggccgctacgccgggcgcaaggcggtgatcgtgaggaccttcgacgagggaaccagggagcgcccctacggccactgcctcgtcgccggaatcaagaagtaccccagcaaggtcatcaagaaggactccgccaagaagacggccaagaaatctaaggttaaggcgttcgtgaagctcgtgaactaccagcacctcatgcccacgcgttacacgttcgacgtggatctcaaggatgctgttacccctgatgttctcggcaccaaggacaagaaggtcactgctctcaaggagaccaagaag

SEQ ID NO: 1629 - DNA, 340 bp, Glycine max
  Clone ID: V4R-02-Q1-B1-D10
ctccgtcgtcctcatggggaataacaccatgatgaagcgctcagtcaggatgcacgctgagaaaaccggaaacaacgcctatctcaaccttatcccgctccttgttggcaatgtgggattgattttcaccaaaggtgacctgaaggaggtcagtgaggaggttgccaagtacaaggttggagctcctgctcgtgttggtttggttgccccagttgatgttgttgttcctcctgttaacacaaggctcgatccctcccagacctctttcttccaggtgctcaatattcttaccaagattaacaacggtactgttgagatcattacccctgtggagctcatt

SEQ ID NO: 1630 - DNA, 413 bp, Glycine max
  unsure (1)..(413): unsure at all n locations
  Clone ID: V4R-02-Q1-B1-D11
ctcgagccgctcgagccgcttaaattaatagggtgagtcttatttttccacggtgatggacaaggttgtggaggaggttgaaaaggtgaagaaggaatgggatgaaacatacaagaaaacgcaagagcacattgaggcaatcgcagactacggcaaatcagcaagagcaaaagaggagaataattctcttgccagattgaatggaatcgctcaggatggcttggctctcctttcttccttcctcttcaccctcgatcttctcgctcctcagttgccctctgagccagaggtccaatccactcgtgccttgcttcaatcttccaaaaccctaactcaaaatttgcggttaaatctgcggaatgccaatctgcaggcgaaggctaacttgaggaaagctgctcaggangagagag

SEQ ID NO: 1631 - DNA, 396 bp, Glycine max
  Clone ID: V4R-02-Q1-B1-D12
gttgtgactcgttcttcttcgtcgttatcttcttcttttgttgtttgtgtgtttgttttttctctcacctgaaaatgtcttgctgcggtggtaactgtggttgcggaagcgcctgcaagtgcggcaacggctgcggaggctgcaagatgtacccagacttgagctacaccgagtcaaccaccaccgagaccttggtcatgggagtggcaccagttaaggctcaattcgagagtgctgaaatgggtgttcccgctgagaacgatggctgcaaatgtggagctaactgcacctgcaacccctgcacttgcaagtgaggtgttggagagctaaagcttcaagcagaaatggcccttagaaataatgataaaaactatatgtagtttcaaaacttcaaaa

SEQ ID NO: 1632 - DNA, 403 bp, Glycine max
  Clone ID: V4R-02-Q1-B1-D2
cgaccactccctcgtctctctcatcaccttcgactccatggtctatctccaccatctctcttcttcccacttttcctctctcctcgtctttcacggcaaccgccatctctcctccaatcagatccgccacttccttaacccccaccgccaccaggcttttcttttgcctatttccgaatgccaattctccatcactactgccattgaagagatccattctacatccaactccaccatctccgcctctcgccctcccaggtgcaccggctctgcaatctccgtcgcccttggtcttttggagtcttgccccatcaatacaggctccaggatcttggtcttcacctctggacctgctactctgggacccggaatcgttgtcgattctgattgccgccaacccatc

SEQ ID NO: 1633 - DNA, 394 bp, Glycine max
  Clone ID: V4R-02-Q1-B1-D3
gcttgagagaaaagaagaaaatcctttcaaataaataaagtttcattactttatgttgataggtacacccagacccaatttcatccaccatgcatcttttttatctcctcgatctctagccatatgtatctaagttctcacctaaacctagctatttccacccttattacgttaataatttgttcttgatcgatgttctctgaatccggttcttcttcgttttgcttcatgggagtttcttcgaattccaaagtctttctctctgacaaagatctgaaaggagtgatcaacaacatggattcattggtacacaaggaagggtgccaaactttgatccaagaagatcaccagcttattagactcaaacaactatcggtgcaacaagaagaagaag

SEQ ID NO: 1634 - DNA, 397 bp, Glycine max
  Clone ID: V4R-02-Q1-B1-D4
gtgatttggagtttggagcgactgaactaatcattaatttgcactcgctgtttcagcttcatcacccttcttttgcatcatttatatctcttgagaaatggcacaagaaacctttctattcacatctgaatctgtaaacgagggtcaccccgacaagctgtgcgaccagatctctgatgcagtacttgatgcgtgccttgaacaggaccctgacagcaaggttgcctgtgagacatgcaccaagaccaacatggtcatggtcttcggagagatacaaccaaggccaacgtagactatgaaaagattgtccgcgacacatgccgcgaaattggattcatctctgatgatgttggtcttgatgctgacaaatgcaaagtgttggtcaacattgagcaac

SEQ ID NO: 1635 - DNA, 392 bp, Glycine max
  Clone ID: V4R-02-Q1-B1-D5
ggaagcttagagagagagagagagagagagagagagaggagagagtattggcgcttcatcaagatgggtatttctagggattccatgcacaagaggcgtgccactggtggcaagaaaaaggcttggagaaagaagagaaagtatgagcttgggcgtcaggcagcaaacaccaagttatcaagcaacaagacaatcaggaggattcgtgttagaggtggcaatgttaaatggagggcattgaggctggatactggcaattactcatggggtagtgaagcagttactcgcaagactcgtattctagatgttgtttacaatgcctcaaacaacgagcttgtgcgaactcagaccctggtcaagagtgctattgtccaggttgatgctgctccttt

SEQ ID NO: 1636 - DNA, 412 bp, Glycine max
  Clone ID: V4R-02-Q1-B1-D6
atcaagcgcagacatgggaacttacaaaggaagaaacgcgaattgatgatggaggtcaccaaagacgaagctgcaacgccaggatcaggaggtgctcaacctcccaatccaatttctaacggtaaccctaatccaaatccaaaccctaacccgaacatgcctcacacccccagaggatccaaaggaaaatcgtgtaagggatgcacctactacacatcgcttcataaggccaagtccaaaaaccccacatgcgttggtttctccagagcactccagcaagtacccccttttgttgttggagaaactgagttggaagcttcaaaagagggccgcagccttgcaaatttcaagtatgcatgtattggatactctgtctacttagacaacaaagaatcttctgctggctctcaag

SEQ ID NO: 1637 - DNA, 410 bp, Glycine max
  Clone ID: V4R-02-Q1-B1-D7
ggaaagcaaacatgcttgatcaggtccaacaccctacaatcatggacaaggttgctggccagctccatctccgttctggtgtttctggtattaggagttatgaaggagcctactgccaccccacaatgtaccaaagaccctcttttgggaattactcgaatgctgcattgcagtatcctgtgatgccctcatgcaaagctactatggatttgtctgctgctgcaacaactgcctcccccgtctttgttgctgctccagcagagaaaggccattttcttatagactttctcatgggaggtgtttcagcagctgtctcaaaaactgctgctgctcccattgaacgtgttaagcttttgattcagaaccaggatgagatgatcaaaactgggtagactttctgagccctacaa

SEQ ID NO: 1638 - DNA, 395 bp, Glycine max
  unsure (1)..(395): unsure at all n locations
  Clone ID: V4R-02-Q1-B1-D8
tttttctctctcttgcaaaacctaattttcatttcttccctcaaatttcaaaatgcgtgagatccttcacatccagggtggccaatgcggcaaccagatcggcgccaagttctgggaggtggtttgcgcggagcacgggatcgaccctaccggaaggtacggtggggactcggagttgcagctcgagaggatcaatgtctactacaacgaggccagttgcggtcggttcgtgccgcgcgcggttctcatggacctcgaaccgggcaccatggacagcgtccggtccgggccgtacgggcagatcttcaggcncgacaactttgtgtttgggcagtccggggcanggaacaactgggccaaggggcattacactgaaggtgcggaattgattgatt

SEQ ID NO: 1639 - DNA, 412 bp, Glycine max
  Clone ID: V4R-02-Q1-B1-D9
agtttgtgtgtctgtttcctccaccatcaatggaacaagaaggacatcaatggatagtgcatcctcatgaagaagaagaagaaattatggaagatggtgctttgataagaaagcaaactgtgtcacataacaagggcaattttattacagatgaattaactttctcatcttcatcttcatcttcatcttctagcaatggcagtgagcatagtaatggagtttgttcagtggtcacagcccccccagatggatatcctgttcagaaagaagaagaagttgcagagatatgaggtgttggtgaaaattgcaaccatgttaatggtgatatagtagattatgcagctgttgggcttgcacaagtggcagaattttcatgaacagaaacaaatggatatgccataagtggtgttgt

SEQ ID NO: 1640 - DNA, 407 bp, Glycine max
  Clone ID: V4R-02-Q1-B1-E1
cggctcgagtccacacttgactcacttctctacaaccctctcaatattttattatacccaacaaaaattcttcactcactcttaatttcttatggcatcatccgagaacgtagccagcattgagccatgtatgcttcgtccccctgtcaccgattcatgtctcgcagagttcttcgctcgtgacgccgatgccttaaccaaggctcttcagaagtctctctccggtactgtcttgccggacgaggaaaactacttttctccctttctgcccaagtcagaccccgccgtcgccacccccaccgtctccagcctctccggctccgatcaggactcggcgccgcgccgccgcgcgccgcttccgccgttcgggaagatctcaagaggaagtcccgcgcctcgaagcgctc

SEQ ID NO: 1641 - DNA, 418 bp, Glycine max
  Clone ID: V4R-02-Q1-B1-E10
tgtcagatcgcttttgcattcattttgatgtaaatatctctctctctgttaatgaccttcttgcatgctgtggctttctgtgtggatctggttgtgatgggggatatcccttgtatgcgtggcaatacttagcccaccacggtgttgtcactgaagagtgcgacccatattttgatcaaattggctgttctcatcctggttgtgagccagcttaccggactcccaagtgtgttaaaaagtgtgtaagtgggaaccaagtttggaagaagtcaaaacactatagtgtcaatgcatacagagtgagctctgatcccatgatatcatgacggaagtttacaagaatgggccagttgaagttgcattcactgtttatgaggattttgctcactacaaatcaggagtttacaaacacatcaca

SEQ ID NO: 1642 - DNA, 414 bp, Glycine max
  Clone ID: V4R-02-Q1-B1-E11
ctagtactaaccatgttcacccaattcctcatcttctccctcttcttcactcccttcatcttcaccgcagcccatgacacccatgattttgtgcgcaccttataccgcaaaatgttgggtttggacgaaaagcacgaaaagctcagccatttcagattctattggcatgacgtggtgagtggacgcaacccttcttcacttgaagttgtgccaccacccttgacgaactcaaccacatcctttggatcggtgaacatgattgagaaccctttgacattagaaccccagttgaactcaaaattggtggggacagctcatgggttctatgcttccacgtcacatagtgagatcagcttgctcatggctatgattttcgcaatcactgatcggaagtataatggtagcaccattgca

SEQ ID NO: 1643 - DNA, 376 bp, Glycine max
  Clone ID: V4R-02-Q1-B1-E12
gtttactggagctggaacgcggcctctgcttcgtttgaaaaccaattgtcccaagaagccagcgatgcagataaggctcgcaaggtttgggagattagtgagaaacttactggtttggcttaagtggtactttggcagcttccaatatccatcttgatttacggacatttgtcatggagttcagtaacatctcagaagagtttagaccctcttctgatgagtttgttagattctttttctagctgctaactcctcttggtctgataactactgtcgatgaatccttcacctgaggccaagtgcacatgaactatagagaaataataattgtgcacatgaactatagaaaaataataattgtgcacattgactatga

SEQ ID NO: 1644 - DNA, 154 bp, Glycine max
  Clone ID: V4R-02-Q1-B1-E2
gtcggacccttatatcacccgctctatcgcacgcgaacacgaatctgtcataacgctcagtacgagggatttacatagcatacccagtttacggaattccatcactttaatgggcagcaatctatcacgtagaacctagatcttcggctttcaa

SEQ ID NO: 1645 - DNA, 398 bp, Glycine max
  Clone ID: V4R-02-Q1-B1-E3
tttctttctagctttcttgcaagtattcttcctcgttcgtgatactaaattggggtcacagattcaacccccgagagattcaatccaatctttcttctcatttctttctggttttacaatttctcacattcaaattctccaccatggctcccaccccttcttcgaaacaaaaccaccccactcaattgaagactccacagtccaagcaccgtctcaacttcaatggcctcaaatcagcaccttctccgaaccctaattctgttgcaaacaaggaacccccacctgaacacccaattgaagtcattgccagaatccgtgactacccagatcgaaaggacaagcctttgtccgttcttcaaaccaattccaactctagttccattcgggttcgtgccgat

SEQ ID NO: 1646 - DNA, 416 bp, Glycine max
  Clone ID: V4R-02-Q1-B1-E4
gagcttagcaaattgacgttagagatcttctcaaaattggagcagcaatggctctcgcactacgaagcatcaaccaaaacgcgcattctcagcattgacggcggaggaaccaccgccattgtcgccggcgcttccctcgtccacctcgaggaccagatccgcgcccaaacctccgatcctcacgcgcaaatcactgattactttgacatcatcgccggcaccggcattggcgccatcctcgccgtcatgatcaccgccgacgacggcttcggccggcctctgtacaccgtcagagacgccgtcaacttcctcgccgaaaacaaccgcgaactctacaagccgaaacgcgccggcgtgttccgccgacgccgtaaattctccgcgaggagcatggaagacacgcctaagcgcgtttg

SEQ ID NO: 1647 - DNA, 406 bp, Glycine max
  Clone ID: V4R-02-Q1-B1-E5
tccttatcctcctcttctgccaacttcaacaacacagacactacctcctctcctctcctcgctcttccaatgccgtcttctcagatctagttactttctattctgcgagctttcactactgcttcattcggaaaacgacagcgtttttggtagggttgttgtattccattggacatgcggccgagagtaaattactccttccccgaggaggtgctggagcacgtgttctccttcatcgagtgcgacaaggaccgaggctcgatctccctcgtctgcaagtcctggtacgagatcgagcgctggtgtcgccggagagtcttcgtcggaaactgctacgccgtctctccggccaccgtcgtcaaccgcttccccaaggttagattcatcgccatcaaagggaagccgc

SEQ ID NO: 1648 - DNA, 368 bp, Glycine max
  unsure (1)..(368): unsure at all n locations
  Clone ID: V4R-02-Q1-B1-E6
ctcacgttcatttctacacatccctagctctgtcgttccgtcgttgacgatggcgtttcgggtgcgaagccctgacctccgctctctctttcttctctctctcttgtccatcgcttccgccaatgtcttcttcgaagagcgtttcgatgacgggtgggaaaatcgatgggttaaatcagattggaaaaaagatgagaacgtggctggggagtggaaccacacctctggtcaatggaatggagacgctaatgacaaaggtattcaaaccagtgaggattacagattctatgctatttcagctgagtaccctgaattcagcaacangggtnagacactagtccttcaattttctgttaagcacgaacaga

SEQ ID NO: 1649 - DNA, 396 bp, Glycine max
  Clone ID: V4R-02-Q1-B1-E7
gcgaattcagcgagagttgcggctgggaatggacggtgacggcgaggagttgacggcgcaggagaccgctttgtatgaccgtcaaattagggtttggggagctgatgctcaaagaagattaagcaaatctcatgtcttagtctatggaatgaaaggaactgtagctgaggtaatcctagaacttgtctctctctggtatctcaaatttgactttggcaaacaaaaaagagtaaaaaaatgggttccccccccccaatatgttgttgtaataatgtgtgaggaatttgagtttcctgctgttggttagttttgcaagaatattgttctggctggaataggtagtctgactttagtagatgaccgggctgccacggacgaaatgctttcctccaactt

SEQ ID NO: 1650 - DNA, 401 bp, Glycine max
  Clone ID: V4R-02-Q1-B1-E8
ccaatatattccattctctctgtgtatttccctacctctcccttcaagatgcagatcttcgtcaagaccctcaccggcaagaccatcacccttgaggtggaaagctctgacaccatcgacaacgtcaaggccaagatccaggacaaggaaggaatccccccggaccagcaacgtctcattttcgccggaaagcaacttgaggacggccgtacccttgctgactacaacattcagaaggagagtactcttcacctcgtcctccgtctccgtggtggcatgcagatcttcgttaagacactcaccggcaagaacataaccccagaggttgaaagctccgacaccatcgataacgtcaaggccaagattcaggacaaagaaggtatccccccggaacagcaacg

SEQ ID NO: 1651 - DNA, 404 bp, Glycine max
  Clone ID: V4R-02-Q1-B1-E9
tggaaaccgatgctgatgtgcagaatgatggtgctcagataagaactctaaattctgataaaaaatttgaacgtttgactcttcatgatggtaaaatcaaatttccaaattgggcaagtgacactccttctattctttgggttctggtttgtgccatcagtgacacactcagcagaggatcttcttcagccacaacaaggagagaaagtattgtagatggaatgagaacaatagctctgaaacttgtatttggagcattccacaatcagatattcgaaaggacactagcagtgcattttacatatcctttctatgtgaggacacgtgttactgataaatgcaatgatggtaccctgcttctgcaggtaatacttcactctgaagttaaggctacactggccatt

SEQ ID NO: 1652 - DNA, 409 bp, Glycine max
  Clone ID: V4R-02-Q1-B1-F1
gcgacaaagttggggagcttatatccaatattgtctgtaaaatgatacttggccgcagtagggacgatagattcgacctaaaggggcttacccatgattatctgcatttgctgggattattcaatgtggcagattatgtaccttgggcaggtgtctttgatcttcagggactaaaaagacaattcaagcaaacaagtaaggcatttgaccaagtgttcgaggaaatcatcaaagaccacgagcatccttctgataacaacaaggaaaatgtgcactccaaggactttgtggacatactactgtcacttatgcaccaaccttcagaacaccatgtcattgatagaattaatatcaaggctattttgttggatatgattgctggagcctatgacacatctgctattggggt

SEQ ID NO: 1653 - DNA, 114 bp, Glycine max
  Clone ID: V4R-02-Q1-B1-F10
cagaatattcgtcacttcaatgaaggagacgtactcgtgattcctcctggtgttccttaatggaactaaaacaatggcgatgaaccagtgtgttccaacaatcctccttaaaac

SEQ ID NO: 1654 - DNA, 305 bp, Glycine max
  Clone ID: V4R-02-Q1-B1-F11
acttgatctgtctgtctaaacactcactgattgacacatcacatcataacacactgggaacgttttgtcagagctgcacaagctgactcaagcgagaggatggtaagattacaagagagaagaattgtttgtgaatggatcgacgtggttcaagatgacgcgagatacgtcggcacgctagtgtggggccatcacagacattagtgtgtttgttggaagcatggcatgagatacgctgaacgagataatgagaacatagtttgaactgtctagtgagatattgcaggctgtagtcatcactgaca

SEQ ID NO: 1655 - DNA, 327 bp, Glycine max
  Clone ID: V4R-02-Q1-B1-F12
gttttgcaagattactcagaaatcttccgtggcacaccagtcaaattcagcatacctgggataagccctggaatcatctttacaggtagtccacttgagatcgagttcgcagagaaaccttattgtgctgaatcctccaaatgggtggcgtttgtggacaatgaaatcaaaaaggcatgtgtgggtattgggggccctgaaggtcatcttggtcaacaaacatttagtggaacatttaccattcagaattataaatttggtaacaaacttgtgtccggtaccactggttcaggaacttgttaaaaaatgggaaggtttgatgcaaaa

SEQ ID NO: 1656 - DNA, 411 bp, Glycine max
  Clone ID: V4R-02-Q1-B1-F2
ctctcaggttttagaagctcagctaagcacaatagagagtttaattaggccattaacatatcatatgggtgtgactaagcctcatgtgcttatgctgttgatcatcatggttgtctcaattgcagagaaaccatcagtaatagaaggaagggctctttccttgatatctggtcaaggtaattttactccctctcttattgtgcttgctgattttgttgtggagtccagtttttaatataaagatacttttaccattaactaattagaattttttagatataatttttaaataattatcttaaaaataactataaaaagaaaagattccattaaagacaatcaatcaaattttttggcatctaaaaaaaaattaattttcaacaaagtttgttgataaaaaacttactatat

SEQ ID NO: 1657 - DNA, 417 bp, Glycine max
  Clone ID: V4R-02-Q1-B1-F3
ttgtgaatgaatcagcacgagatgtttcactgctattggatcaagggttcaagtctcagaagcactgcttcttccatccactgtcgaatgacatgtctatatctctaaatgcatgtgatcttgacaagtttcttaaatcaattggaagaaatccatcatacgttgatttggagaccaatcctacagtggggaaagatcaaccccctgatctagctgcactagttccatctggttccatagttttacccgatcaaccccaaaaacaatcttcttcacaggttcctaaggatgcaaaccatgtttctgtggataatggagccaatacagtttcagctaaagttgtcaagccatcctctggtgggaaaaatacaaaggggacaccagcaaaaaatgttaattcatcaggctcctttgcag

SEQ ID NO: 1658 - DNA, 408 bp, Glycine max
  Clone ID: V4R-02-Q1-B1-F4
ctcgagccgttttcaaacccaaaaaaaatccaaaaaaagaaaaacaaaacgcttaacgcaatacaaaaaccacagtttcaatcacatctctctctctctttctcgcaaatttctactttctgggttttctatttgagattcgttgttccaatgagcgatcacttggtggtgttcgttgaccgtctcgcgcgccctgtccccgttgacccggtggcgcagccgccttccgagccgtctcctcctccggcccccgtgaatgctgacgcttccgggagctccggcaccgctccggtggaggattgtgacggagagggcggcggcgaggaggagccgctgattcagatggcggagtgccgcatctgccaggaggaagacggcgtttccaacttggagacgccctgcgcctgt

SEQ ID NO: 1659 - DNA, 412 bp, Glycine max
  Clone ID: V4R-02-Q1-B1-F5
aaaatgtccgcacaggaacgtgaagaagagaagatattctcacaagaccgcgcggcgaaccaaatttgagctgaaaggggacgacatggtttatgcgcagctcaacaaacccgatcaagagagaccccctttacccgtcgacgaagatttgcctgggatgggccagtactattgccttcactgcgatcggtactttgccaatataactgtgagggatgagcactttaagaccaaacgacacaagaagcgtataaaacaaatgatgggtcctgcaccacatactcaacttgatgccgatttagcttctgggatgggtatgccagacaatggaccaaagctaatgtctatgtaacttcgtttttggtagtgggtgggacgattgtcttgggagctggtgttataaagatatata

SEQ ID NO: 1660 - DNA, 402 bp, Glycine max
  unsure (1)..(402): unsure at all n locations
  Clone ID: V4R-02-Q1-B1-F6
atctgaagaagattgtaactgagattggacctggagttactggtgtggaactagtcaaggatatgaagaacaccaacaataaccggggctttgcttttattgactattataaccatgcatgtgctgagtattcaaggcaaaagatgatgagcccaacatttaagctaggtgagaatgctccaacagtgagctgggctgatcctaaaaatgctgagtcctctgctgcatctcaggtgaaggcagtatatgtgaagaaccttccaaagaatgtaactcaagagcagttgaagaagctttttgaacgtcatgggaagatcacaaaggtggttcttccaccagcaaagtctggacaggaanagaacaaaattggccttgtacattttgcagagaggtcaaatgcta

SEQ ID NO: 1661 - DNA, 403 bp, Glycine max
  Clone ID: V4R-02-Q1-B1-F7
aacaacaagaagatgccttctgcagaagcttcctccgaaaccatttgtgtcaccggcgctggtggcttcatcgcctcttggatggtcaaactcctcttggaaaaaggctacactgtccgaggaaccctcagaaatccagatgatcccaagaacgggcacttgaaggagtttgaaggagcctccgagaggttaactctgcataaggttgacctccttcatcttgactccgttagatcagttattaacggttgccatggtgtctttcacactgcttctcccgtcaccgataaccccgaagaaatggtggagccagcggtgagtggagctaagaatgtgatcatagctgctgcagaggctaaagttagacgtgtggtgttcacctcatccattggtgccgtctata

SEQ ID NO: 1662 - DNA, 381 bp, Glycine max
  Clone ID: V4R-02-Q1-B1-F8
ttttcttgtagtgaatggttctttccttacttttccctattcaatctcaatcatctcttttttctctcttctctctcactctgctcaattcaggacacctttttccttctgatccttctggatattggtttacttgagtgcataatatcagcctgaagctgtacgtaattctggatatctaagccacaccggaaaaatcagcatgcgttggttgggtctttctgttgacgtgttccgccaagttatacagttgaacttgtattgtaaagttattctgtagatgatcatttccaaaaatcctatatttttttgcttctggtctctttgcttagccactgccatggatgccaaccattgtctgatcgtttcttctgataagta

SEQ ID NO: 1663 - DNA, 388 bp, Glycine max
  Clone ID: V4R-02-Q1-B1-F9
tccaaactaactctctcatcttctacagcattcttctgcaattcaaatcaaattttcaaaccatggcttcctccaccaacgctcttcctcccaccggcaacggcctcatcgtgagcttcggcgagatgctcatcgatttcgtccccaccgtctccggcgtgtcccttgcggaggctccgggcttcctcaaggcccccggcggcgcccccgccaacgtcgccatcgccgtcgcgaggctcggcggaaaggcggcgttcgtcggaaagctcggcgacgacgagttcgggcacatgctggctggaatcctgaaggagaacgacgtgcgatccgacgggatcaacttcgaccagggcgcgcgcaccgcgctggcgttcgtgaccctacgcgc

SEQ ID NO: 1664 - DNA, 403 bp, Glycine max
  Clone ID: V4R-02-Q1-B1-G1
aagtaatggtggtgagcttgaactttgttaccagagtcaacttaatcagagaagtagagtcaacctaatcagagattggagtttcataggaggatcaagaattgttgttaaaccaaatttcgtgagattggttccttttcgaaaagccagtcgtgtctatgcttcatggttgtcaggatcacaacttgctagcagcgcctttacactgggaacaacagcagtgctaccattttacacactcatggttctagctccaaattctgagctaactaggaagtctatggaaagtagtgtaccatatgtagtgcttggcattctatatgcatatttgttgtaccactcttggacccctgagacagttggacttatttttgcaagtaaatacttgctaccagagctgact

SEQ ID NO: 1665 - DNA, 264 bp, Glycine max
  Clone ID: V4R-02-Q1-B1-G10
gtacgaagtttttttataatatcgttgtgttcttttgaaatttgttggtgccacatttttttgatcttacctcgactcctgtaataagtgttccaaggtcaaacccatgatgaggattttcctagttgaggctagatatttctggaattatgtttttgaattaaagatggagtctgtcttttttaacccgaaatgacccgccataggattttctaattttaataatgatggactttctttactgatgcaaataagagaacaaag

SEQ ID NO: 1666 - DNA, 315 bp, Glycine max
  Clone ID: V4R-02-Q1-B1-G11
tgcaacctacatcaacattgatcatggtggacgagcttactcacatcgcgcaggtgctctatcagatactcagccccgacgccatcgccgtcacagccgccaccgatgcgctcgatttcctcacgcttactccgcacatgatttgctatctccacaccatttccacgttaccaggagatctgagtcagagcatctctgctgcgatctaccgcatgaatcgcattcgccgtagcttccatagctgtagagttaagccatcaatcgtgagcaatgatttccaattccagctgatgcaggcgttgcttcaaatcgggt

SEQ ID NO: 1667 - DNA, 415 bp, Glycine max
  unsure (1)..(415): unsure at all n locations
  Clone ID: V4R-02-Q1-B1-G12
acataaatgaagagaaagttctgactgaaatcagccttgagaaggatgtagatggctttcatcctttgaacattggcaagcttgcaatgaaaggcagagaccccctattccttccctgcactcccaaggcatgtattgaactattacagcgaagtggtgtaagtataaagggaaagaaagcagttgtggttggcagaagcaacatagttggactaccatcttcattgctgcttttgaaagcagatgctacagttactattgttcattcacacacaagtcaaccggaaagtatcatacatgaagcagatattgttattgcagcagcangacagccgatgatgatcaagggaaattggattcaaacaggagctgcagtcatagatgttggcacanatgctgttgatgacccaacaaa

SEQ ID NO: 1668 - DNA, 401 bp, Glycine max
  Clone ID: V4R-02-Q1-B1-G2
gctgtggttatcatcttcttcttcctctttcttagatctcttctttctctacgccgcacgccgaaaccatggccggaaaaggagagggtcctgctatcggaatcgatctcggaaccacctactcttgcgtcggtgtgtggcaacatgaccgcgttgaaatcatcgccaacgaccaagggaacagaaccacgccgtcttacgtcggattcactgacaccgagcgtctcatcggtgatgcggccaagaatcaagtcgccatgaaccccatcaacaccgtcttcgatgccaagaggttgattggtcgtagattcagtgattcctctgttcagagtgatatcaaattgtggcctttcaaggtcattcctggtgctgctgacaagccaatgatcgtggttaactac

SEQ ID NO: 1669 - DNA, 417 bp, Glycine max
  Clone ID: V4R-02-Q1-B1-G3
atctgaagaagattgtaactgagattggacctggagttactggtgtggaactagtcaaggatatgaagaacaccaacaataaccggggctttgcttttattgactattataaccatgcatgtgctgagtattcaaggcaaaagatgatgagcccaacatttaagctaggtgagaatgctccaacagtgagctgggctgatcctaaaaatgctgagtcctctgctgcatctcaggtgaaggcagtatatgtgaagaaccttccaaagaatgtaactcaagagcagttgaagaagctttttgaacgtcatgggaagatcacaaaggtggttcttccaccagcaaagtctggacaggaaaagaacagaattggctttgtacattttgcagagaggtcaaatgctatgaaagcactgaaaa

SEQ ID NO: 1670 - DNA, 390 bp, Glycine max
  Clone ID: V4R-02-Q1-B1-G4
ctcgagccgcaaaactataataatgggttcttcttctcctccggacactagcaagagcataaagctagagcgatacaacagctacatcaggagactcaacagcaccaaactcctcaacgcctcctccaaactcctcttccgtgccactatcttagtcgcactcatcctcgtcttcctcttcaccttcaactaccctcccctcgccccagacttcacctcccaccgccacctccactcccactcccacttcctctcctcctcctcctccttcgcctcctgggagaagcaggtccgccactcctccacccctcgccgccccaacggcctcaccgtcctcgtcaccggcgccgctggcttcgtcggcagccactgctcccttgccctcaaaaa

SEQ ID NO: 1671 - DNA, 396 bp, Glycine max
  Clone ID: V4R-02-Q1-B1-G5
gctgaagtcatagaagagaagaaggaagtggaagtgacggaagagaagaaggaaattgaagtaacagaagagaagaaggaagcagaagtgaaagaagagaagaaggaaggggaagtgacggaagagaagaaggaagttgaagtgacggaagagaagaaggaagcggaagtgatagtagaagagaagaaggaagttgaagtgacggaagagaagaaggaagtggaagtgaccgaaggaaagaaagaagtggaagtgatcgaagagaagaaggaaacagaagtgacagaagaaaagaaagaagtggaagtagaagtgagggaagagaagaaggaaagtgaagtgaaagaagaagaaaaaggtcgggaggttgttccagaggaagttgagatatgggga

SEQ ID NO: 1672 - DNA, 391 bp, Glycine max
  Clone ID: V4R-02-Q1-B1-G6
aaatggcagcggcaggttgtcagaagcttctggaattgagcacgaagatcgtcgctgttggcagaaactacgctgctcatgccaaagaactaggcaacgccgttcccaaggagccggtgttgtttctgaaaccgacgtcgtcttacttgagtaacggcggaaccattcaaatcccacacaacgagggctctctgcatcacgaggttgagctcgctgtggtcatctccaagaaagcccgtgacgtctccgaatcctctgccatggattacgtcgccggttatgcactggctctggatatgactgctatggaccttcaagctgctgctaagtctgcaggtcttccatggagtttggcaaaaggccaggacactttcacccctattagctctat

SEQ ID NO: 1673 - DNA, 413 bp, Glycine max
  Clone ID: V4R-02-Q1-B1-G7
ctctgtgtatttccctacctctcccttcaagatgcagatcttcgtcaagaccctcaccggcaagaccatcacccttgaggtggaaagctctgacaccatcgacaacgtcaaggccaagatccaggacaaggaaggaatccccccggaccagcaacgtctcattttcgccggaaagcaacttgaggacggccgtacccttgctgactacaacattcagaaggagagtactcttcacctcgtcctccgtctccgtggtggcatgcagatcttcgttaagacactcaccggcaagaccataaccctagaggttgaaaactccgacaccatcgataacgtcaaggccaagatccaggacaaggaaggtatccccccgggacagcaacgtctcatcttcgccggaaaacagctcgagg

SEQ ID NO: 1674 - DNA, 405 bp, Glycine max
  unsure (1)..(405): unsure at all n locations
  Clone ID: V4R-02-Q1-B1-G8
cattctcatatcctcaatcaccccccctcgcactcgctcttcccttcctctggtggcgacaatgtcgactcctgctaggaagaggctgatgagagacttcaagaggctgcaacaagacccgcctgcagggatcagtggtgccccccaggataacaacataatgctgtggaatgctgtcatatttgggtgagttgaattgaaattgaatatagatcccatgttgttttaacttatagtcaattagtctattcatttttttttatttcttatgttgtttaattattgatggataagtgatttttggattgcagtcctgatgatactccatgggatggangcacgttcaagttgacactccaatttactgaggactatccanataaaccaccgactgtacgatttgtg

SEQ ID NO: 1675 - DNA, 414 bp, Glycine max
  Clone ID: V4R-02-Q1-B1-G9
gctgcgcagtgtttgaacgttgaaggagagcgtagaggcagtggttttctttttttgatttctctttgtagaatcgaatcgagttaatttttgatcgtgtgagtgtccgatcttgaaatccacaacaacaatggtgagaggattgctcaacaagctcgtctctcgctccctctcggtcgccggaaaatggcagcacaatcaactccgccgcctcaacatccacgagtaccagggtgctgaattgatgagcaaacacggagtcaacgttccgagaggcgtggctgtttcctctgttgaagaggccagaaaggtcatcaaggaccttttccctaatgaaaatgagttggtggttaagagtcagattttagccggcggacgacgtttgggaactttcaaaatccggccttaagggag

SEQ ID NO: 1676 - DNA, 412 bp, Glycine max
  unsure (1)..(412): unsure at all n locations
  Clone ID: V4R-02-Q1-B1-H1
ctgaattctgactctgagagagaaaccttaatcatttacgctttcacagcttatgactcacctggtcactcgcactcaactcgctagagtcacgcagctctctcatcgccccaaacccctcttcttcacaccaaaaccaacactttatcgttcccaaaccctctctctcccccaactctccacactctcctccgccaccttccgccgccgaacgcaccctctcctccgcccgacgatggacccgcaaccgccggaaccttccgcgcccgccgcctcggcggaggacttcgtccacgtcacggatctgaagatggagagcctctccgagagcatggttcgaatcgacgagccttccgaagccgacgccgctcncttcgctccggactccgattgccgtccagccacgctctcg

SEQ ID NO: 1677 - DNA, 177 bp, Glycine max
  Clone ID: V4R-02-Q1-B1-H11
agttctccgctcgagggactctcgtgctgctatggttttagcgcatcttcctccacatttaaggaagatgggtcatgaaaacgttcacatcactattgtggtcatttggcatgtctaccctgggaaatccactaccactggtcacctgatttacaagcttggaggcattgacaagcg

SEQ ID NO: 1678 - DNA, 345 bp, Glycine max
  Clone ID: V4R-02-Q1-B1-H12
gtaaactggaaattttagtgagcacaaattgaagaaggtttgctaatgtagatgagaaccgtctttaatgtagtgtgtttgggtgagtttttaaaaaatgattttgactttgcaaaattgatttccaagcaatgtggtttatgtttcatgtttcgatgtttttatttcaaaagcaggatacgatttgttatccaatgaagttatctataattgcttcaacgcaatcaattatggactcgtggatcattttttttaacataaaactaaacatatgaatatttacttaaaatcatcttagctagtacttcaactagacatgccattacgaactttacaatgcacaac

SEQ ID NO: 1679 - DNA, 384 bp, Glycine max
  Clone ID: V4R-02-Q1-B1-H2
accaattcattctcatacattccttcttcttcttcttcttcttcttcttctttcacaatcacaatggcgcgagtggatctggatggtaaccccatcaagccacttacgatctgcatgatcggcgctggcgggttcatcgggtcgcacctctgcgagaagctcatgtccgaaacccctcacaccgtcctcgccctcgacgtctacagcgacaagatcaaacacctcctggatcccgccgattcccccctcccttgggctggccgcatcaccttccaccgcctcaacatcaaacacgactctcgcctcgaatgcctcatcaagatggcagatctcactattaatctggctgcgatttgcactcccgcggattacaacaatcgccct

SEQ ID NO: 1680 - DNA, 392 bp, Glycine max
  Clone ID: V4R-02-Q1-B1-H3
ggaatcagaggctccccctaacttctggggccacaccccggaagaagaatactacacctcccaaggcgttcgcaacaccaagtcccacttcgaaacccccaacggcaaaatcttcacccagtccttcctccctctcaacctccaaccccaccaagtcaaagccaccgtctttatgacccacggctacggctccgacaccggctggctcttccagaaaatctgcatcaacttcgccacctggggctacgccgtcttcgccgccgacctcctcggccacggccgctccgacggtctccagtgctacctcggcgacatggacaaaatcgccgccacctccctctccttcttcctccacgtccgcaatagccacccctacaaaaacctcccggcat

SEQ ID NO: 1681 - DNA, 326 bp, Glycine max
  Clone ID: V4R-02-Q1-B1-H4
aacagggttttgggaaaaatggaaggtgttgagtcatttgacattgatctgaaggagcagaaggtgacagtgaaaggaaatgtggagccagatgaagttctgcaagccgtttccaaatctgggaagaagactgcattctgggtggatgaagcaccacaatctaaaaacaagcctttagaaagtgcacctgttgcctcagaaaacaagccttcagaagctgcaactgttgcctcagctgagcctgaaaacaagccttcagaagctgcaattgttgattcagctgagcctgaaaacaagccttcagatactgttgttgaaactgttgc

SEQ ID NO: 1682 - DNA, 281 bp, Glycine max
  Clone ID: V4R-02-Q1-B1-H5
cacaaacttctcttccgagtgttccattccaacttgggtgtggctatggatcgcgctcagcttcttttggtgggtgtgcctctcttcctcgtctgctcagacctcttctcccttttcactcatcatccaccaccgccaccccaccaccatcacccccaccaccatccacctcaccaccaccatccacctcaccaccatcacgacccgcctcaccacccaccccaccatcaccatcagccgccccaccaccatcagcagccggtgataatagagttccctcc

SEQ ID NO: 1683 - DNA, 413 bp, Glycine max
  Clone ID: V4R-02-Q1-B1-H6
gcgatatggaacttttaaaaatggtaagatgttgccaatgtacaatgcacagaagatgactgctgctaagataatggaccagcctttcattgtagcaaaccaatcagatagtttgcgctttcataattcagtagagcaaattcagagtgtcagtgatgctcagctaagtaatgctagtgaaagtccaatgcctgctttagctgcaaataagcatgcagactctcagttatcgacacctgctgttgaacctgacttacttattatgagaccgaagaagcgaaaaagtgccacatctgaactcataccatggcataaagaactgttacagggttctgaaaggcttcgagatatcagtgtggcagaattagactgggctcaaagtgcaagcagattgattgaaaaagttgaagaca

SEQ ID NO: 1684 - DNA, 400 bp, Glycine max
  Clone ID: V4R-02-Q1-B1-H7
gagacacagattcttaccaaataaacaaacaaaaaaacacacacacacacactttccattttctgtggttcttcttctcacttctctaatcttctcccccctctgttactccccgcttctctgaatccctttctgttaatcatctgtctttcacctcgtgattccaaaaagattcaaactttgaaaatttttctcgaaagccaggtgttttcagaatcgagatccagtttctttttatccttttgttaagaaattattattttctttcattcagccaagagggttgtttttgattcctcaaagcttttttctttcttcttggattaaaggggttgtctattttaaacctcttccatccctttttttttataaaaaaaattattatttttttttgtaattt

SEQ ID NO: 1685 - DNA, 375 bp, Glycine max
  unsure (1)..(375): unsure at all n locations
  Clone ID: V4R-02-Q1-B1-H8
ctttgttcttgacagagtcaccccaaaacaaacctaaatcgccttctctctctctcgttcttttggccttgaaagttgaaagctccaatcttttgcatttttcatttcccttaatatttgattctttgtggagattttgcatttattcactttccttaaagtttgtttccttgtttgcgttttgtggcaatttctgattggttgagagtgaattctgaattctcacaccacctaccctttattctcatattttgtaacctctgatcattgtaaagttntgctctttctgggttttgaattttgccacttccaccctgaaattctacaaggtgtnttttgatgttgggatcatcataagtcantagactatggttt

SEQ ID NO: 1686 - DNA, 400 bp, Glycine max
  Clone ID: V4R-02-Q1-B1-H9
tgcgctagaagggttttagggcatggtctagtgcttataaataccctgcattagccactagatttcacaaactgaggcacacagaaaaaatgggttcttcgtcttctatgtggacggtgtgtgtgattttggcatcactggcctctgcagcactctgtgccaacccacgcaggccagtggatgtacaatttggccgaaactacgtgcccacatgggcctttgatcacatcagatatttcaatggtagttctgacattcagcttcatcttgacaagtacactggtactggcttccagtccaaatggtcttacatgtttggtcacttcagcatgtagataaagatggttcctggagattctgctggcacagtcactgctttctaggtatcttcccaaaacgc

SEQ ID NO: 1687 - DNA, 293 bp, Glycine max
  Clone ID: V4R-02-Q1-E1-A9
ggtaataacaataataaaagatttcttgatacatatgactattaacatcaatgattcaatgttccaaggggaaaaaatccttcaaatataaactttaaaaatacaaaaagaaaatggaggaaaaagagatcatcacaatcactcccttgctacaaacaacctactaagaagatatagatgaaccacggatagccaaacgcaaaaaatgcctttctaactgtctggcccccacacaaaatatgatgcatcaagctaaaaatagaccctctcctttaaagatgcttcctcacctc

SEQ ID NO: 1688 - DNA, 346 bp, Glycine max
  Clone ID: V4R-02-Q1-E1-A11
agaagctaagagattccatttattgacgcacaagaatctgacatgaatgtggcagtcatagtaaaaattgactatagtacaaaataataatgtaacgacaatacatatttacaccaccatcctccaacccaggctacgtacatcaaccgaccacgtaaaaaaatgatggcagctttttccaatgtctaaactgaagcaaccgaaaacagtgtgtataatcccaacaacacattattagatgaactgtgtatgtacatacattcagttgcttgcactgccttccaacaagctcctcaagctacaaagagcctctgcagagaggctacagcatctcaatttccgttgg

SEQ ID NO: 1689 - DNA, 330 bp, Glycine max
  unsure (1)..(330): unsure at all n locations
  Clone ID: V4R-02-Q1-E1-B9
gatgcaacatttagataattgcagacattttgtcctctattgtatgttacaatctgctgtgatacaggaaacagggtattctacataaccatcgggggttgggtgataatgagtagcatgtatctctaaatctgcttttacagggcaaccgaatacaataaagataccaacaaaaatatcatattaaatagaaaaggaaagcgcagcattctcatatggaaacaacacttcacgagcctaganacgggcattgcttccttgcatgctctggaaacaaatttcaccanaaatctcagaatgggactcctttcagttcatggggatttgaaa

SEQ ID NO: 1690 - DNA, 296 bp, Glycine max
  Clone ID: V4R-02-Q1-E1-B11
tttattgaaaatactactatcttatctttcaagcaaaattcccaaatagttcgaaccaacaccgatgcaaaatcctatggataaaaaatacaccgatgcaaggaccaaataacagaagtacaacattcacggacaaaaccacaaacaaaactcgacaaaacttaaatctaaagtaacattgttcatatgagaaataaattcggctaagttcaaaagtaagttaaatagttcaaacaatttaaagcttgtcttcaaactcggaaagaggagtcatctgttccttcaagcccttcctc

SEQ ID NO: 1691 - DNA, 362 bp, Glycine max
  Clone ID: V4R-02-Q1-E1-C9
ccatcgcaaaagcaaatgtaaaattctattttttgcaggtctaaaatctattcaagaacaatgttaccgaggcatagtggtcatggtacagccatccctataaacataaggaacgagtgtagctaccagacaacggacaacataaaaataattttacaggaaaaacgggtggaaaaaatggggtacaaaacggggagaaaatggttgaagatagctccgattagttaagaggggggatcaccctcaggagcaacaaggtcatccttcggcagatcggattcaattttttgctcctcaagtgtaactttatctgaactatcatctgttgtatcaatagattcttccgatttactgttgtcatc

SEQ ID NO: 1692 - DNA, 346 bp, Glycine max
  Clone ID: V4R-02-Q1-E1-C11
gaagtaagaacacataaaactatatgcttttccccagtacaatatttccgtgttcaaagaattaacatacaaacattaaaatggcccaaattaggccaacctatattggtattctgcctaatgtaagtgaggttattgtatgttcaagactgccagccaaaaaaaacagagctttggtcaaccaagtcaacgagcagtgtttgaagagctttggttaaccaagtcagcaccactaacaaaattagcaacaaatgatatcaaacgaaatggagcaccgataaacggagcatctgtgattggcacagcatcagcatcattttccacattcttagcatcctgcaactct

SEQ ID NO: 1693 - DNA, 373 bp, Glycine max
  unsure (1)..(373): unsure at all n locations
  Clone ID: V4R-02-Q1-E1-D9
gaggataacccttttagtaatgcaagaacggcagttaggacaaaacaagtcatgcgtctcttgttttgccaatactgcctcaacatcgaattcttccagttgctcatcaatctcttctatcaggataggagcttcctttgtacttgtttcttcaggaaaatttgtaatagctgtagcttgtatgtcagatgaattatgtaaatgggatatttctgtagtggaagggagcttgttgtccacggttttcatacattgatcactgatttcactgcatagactattttgaaaaactagctgatctgcttgtacatcaaattctctctcccctagatttgtnagatggacagacacagaagcatcaacattttgaact

SEQ ID NO: 1694 - DNA, 356 bp, Glycine max
  Clone ID: V4R-02-Q1-E1-D11
tagcaaaatactttttactttcgttacttttaaaggaattagaagagttgtgttataaacacacataacatgatagtattgcttagaaatgcatcatagttcatcatggattctttgttctaaaggagcctctgcattattaggaacacgattgcctctgacttgatgaagattcacgtcatctgcaacagcttggggccttagctctgcctgtcccaccataccagcttttatggcctcagtaacctttctttgcaacgtaagtagtccaattcgcttggaaacaacataaaaaacagcaagggagaacaacaaaaaaccaaccccgattatttacctgtctatgacatcttgac

SEQ ID NO: 1695 - DNA, 345 bp, Glycine max
  Clone ID: V4R-02-Q1-E1-E9
tttgagagcaaaatgatgatattgtatatggtggttcctaccaacttttgtaattttatgagacaaaagaatgttagggtccgggtatctgtctatcgtacaaggaagagcacaaaattcccactgtacatgcgccagggtttgctgcagctgatactttgaacactgcatgaaggttacaagcaacacaaatccaactacagagatctttcatgcaatgaaattaacaggcagaaagttacactttcctacttaaaccaaaaaatttctcacacatccaatggaacacaaactcaatcaagcttcggggaagacacagtgaaaactcatgaattaactggaatg

SEQ ID NO: 1696 - DNA, 374 bp, Glycine max
  Clone ID: V4R-02-Q1-E1-F9
aatgcagaatgaggggtaaataaaacaaagaaaaccaagaaacaaaatccatctgaagttgatagcaagcaagtccaacgcgaaaggaaaaggatgaagacatatatataaagaaaaccaaaagctactagcattaaatttctatgcctctttgatcaggttgagggcatcagcctctgtgggaagagcaggaattgctccctttttagtagttgtaattgctccacacgcatttgcaaacttgagtacttcccttaaccttgcttcatcttcaagtacggattgatcatcgacaatcttgcttaatagagcaccaacaaaggaatcaccagcgccagttgtgtcgaccgtgctgacatgaaaagcctccactg

SEQ ID NO: 1697 - DNA, 276 bp, Glycine max
  Clone ID: V4R-02-Q1-E1-F11
tactcgaagcattaacttgatttgcttatcttgacataggttgaatagaagcagagcatagtatcaaattaaaggcataggatgatgagtaacaaatcgagtcgcatccagcatggatagagaatgaaatcctcctacttgagtactcctaattacaatccaaatcatatacgcttaaacatatgattaatacagtatcatcgtcgatctcgatgtacaagttgccatacagagtgcagggatatgacagatagagagtgctcagattcagctatg

SEQ ID NO: 1698 - DNA, 288 bp, Glycine max
  Clone ID: V4R-02-Q1-E1-G9
tttttttttttttttttttttttttttttttttttttttttttttttttttttttttttttttttttttttttttttttttttttttttttttttttttttttttttttttttttttttttttttttttttttaaaaaaaggggagggaaatttataggaatttagaaaaaaaaaataaaaagttataaagggtaaaaataaaaagggtaaaaaagtgggaaaagaaaaatttttttaaaaaagtggaaatttaaaaaaaaaatttttataaaaaaaaaagaagctag

SEQ ID NO: 1699 - DNA, 59 bp, Glycine max
  Clone ID: V4R-02-Q1-E1-G11
aacccagaaaaaagacccataacatttaaaaccccaaaaaagtaaagactctgaaacag

SEQ ID NO: 1700 - DNA, 251 bp, Glycine max
  Clone ID: V4R-02-Q1-E1-H9
aaaaaaataaagggaaaaaagaaaaaaaagggaaaaaaaaaaaaaaaatggaaaaaagaaagggaaaaggaaaaagtgggaaaggggaaaaaaaagaaaaaaaaacccaaaaaaaaaaagggaaagaaaaaattaaaaaacccgggcaaaaaaaaccaatccacccaaatttaaaaggcaagggcccttttgaacccaggggggaaaaaatgggggaaaactttaaaggccagggaaaaatttgaaaaggg

SEQ ID NO: 1701 - DNA, 345 bp, Glycine max
  Clone ID: V4R-02-Q1-E1-H11
gaacactacaaatagaaagttgacatttaataaaccaaagcaacacaacgcagcaaagtcctgaaactcgctgcgcttaacaaaaatgtaatcaggggttccgacaaacacaacacattaaaacacagataaataaaagcaattttgccaccgtcgatcaagaacccagttctgggaacaacagttgcgagatgatggtggagacttcaaactttgtccgaaaaacaagctacctagaaaagaagacacaagagtacagaaaagaaaccaacatttattgtaaccaacatcccctgatgaaccagcccgcacgattcacttcttcttctgggcagccttggtgac

SEQ ID NO: 1702 - DNA, 382 bp, Glycine max
  unsure (1)..(382): unsure at all n locations
  Clone ID: V4R-02-Q1-E1-A10
tttatcaatgatgtaagagctttattactctactttgaaacttgatgctttaattgctttacatgattttcatgtgtgcctggtagtcttccaccagagaagtaaccatctgctgataatatgatgagaaaagaaactgcaagccaagaagaaaccacaaaatagcatgcatcatagctaacatcagtgaggattattggtctacgtctgtcncaaggtcaccccaccgcacattgtgtctggctgcaagatagtgagcaccaacaggacccctactaccataaggatagtactctggaattatcttcttctcttcaagctccttcagtacaggtgtaaagagtgaccaagcagcatccagttcatcgctacgtataaagag

SEQ ID NO: 1703 - DNA, 372 bp, Glycine max
  unsure (1)..(372): unsure at all n locations
  Clone ID: V4R-02-Q1-E1-A12
aaaatgatcaagcattttcatttccgagttcttaaaagagcagtgttctaatgttggacatcaacataatatctaaaaataaagcgaggttttacaaaaattttacagtttgcaatcataatcataatcatcatcaaaatacaaggcgaaacatgacagcagcagcaagccaacatcaccaatggctaccagaataaactgcaccaaggcaaaagcaatagctaacagaatacagctgataggcaacaactatgaagctgctctaccagtagtttgcgtcncacatattatgcaaccaaataatctgctttttcgggtgaaattgcatttcaagcaacggtgccatctagcagcatcaaagaaatgtgtctg

SEQ ID NO: 1704 - DNA, 324 bp, Glycine max
  Clone ID: V4R-02-Q1-E1-B10
cgaaagtaaagttcttcatcgtgatttaatataaaaaatataaagtaagtaaaaactctaattaatcataaccatcaaaggctataacaaagcatgcatgctgcacctttcactaaagtgttcagtatttgtacacatcggtggacactagacaagaaaacgaatggtcattagagagtggaatctttgaagcttttctccttattgcaacccttgtgtaacttgtttcatggaacaacttttttccaaaataaatttctatccaaaccttccctggtgttccttatatcaaggggactattccggaaactttaaagattagaa

SEQ ID NO: 1705 - DNA, 263 bp, Glycine max
  Clone ID: V4R-02-Q1-E1-B12
gggccccggaaaaagggggaaaaaattaaaaaggaaaaaaaaagggggggccccttccccggtttttaggggcgaaaaagggggttaaaaatcccccagccaaaaccgaaagggggggaaaaaaatccaatcggggcagggggggaaaaacggatttagttcaagaccgaaacaccaaaagatggcaaaaagggggaaacccaaaaattgcccttgggggaacacccaaatttcaggggaccacgtccggaaacgggggaaaa

SEQ ID NO: 1706 - DNA, 136 bp, Glycine max
  Clone ID: V4R-02-Q1-E1-C10
atcttaaccgctcttcaggccaaaattgaagtttgaagaacaatatattcatcatatcatcattatttgcttactccacctcagttctagttcactaaattttcaaactaatttttggcatttgattgcctgcaac

SEQ ID NO: 1707 - DNA, 322 bp, Glycine max
  Clone ID: V4R-02-Q1-E1-C12
tgaaacaaatactaataagcaatctcatagaacatcattacgcaaccgaaaaaggcaaaaagtgaaatccagaaatataaaagaaaaaaaaaaatacagggttgattgaaaaactgaaaattaaaaatcaaatccaccagcatcatcaaagcccgcatcatattcagcagcatcagataccatgtctccgatcaacattccacccaaggcaccaccaagcaatcctgctcccaatcccattccaaatttgttcttctttggtttctgagcctgaggtgggtacccatatccggattgttgtggatatccataacccgactgt

SEQ ID NO: 1708 - DNA, 365 bp, Glycine max
  unsure (1)..(365): unsure at all n locations
  Clone ID: V4R-02-Q1-E1-D10
gaaaaatctgaaatccaatctattcatgagtctcatgatatgaccactgaccagtcaaagtgtcactatatgcggtagcccaataaattaaaaactgtataactttgaaggacaatacgtgcagaatgattacaagttacaatcttgcctcaattggatgaataacagccaattttccttctttcgtattatatccacacatgacacaactatttttcaacataggaaaaccaaaaccaataaacaagccaggaataaaattacaacaacgctgacaaaagaatgatagcatcaactaacaatgacaaactcaggaaaaataaaccaaaanagaacaaataataacaaagggtagagagaacacg

SEQ ID NO: 1709 - DNA, 135 bp, Glycine max
  Clone ID: V4R-02-Q1-E1-D12
ggggaaaaaaatttttttggggcccaccaaaagaaaagaaggggtccggaaaaaacccacacgggtcccaaaaaaagggggggaaatcccaagggagctgcagaaaagaaaaggcgggagtgattaagggggagg

SEQ ID NO: 1710 - DNA, 387 bp, Glycine max
  Clone ID: V4R-02-Q1-E1-E10
tttacacttaaaatttctcttatctttctaaaaatatattttacatcaaattcaagttctttcctcacaaacttgacatacacccctttgcttttggaacatagccccaaacaatagggaaacgctgcaaacaatagaaaatccttcctcactccgtcactcggcataacagtgcttgatgcaactattctgcattttagtcataacattgacgagatttggtacgcaatacgacacgtgttatcttcggcgatattaatgcgacttcccaaaacctccattttaagatataaactccaaaattaagaattgaagcatgtgaactgcaaagcgaactccacgcaagaaaaagacacctatgctgcaacaaagcaatcaaaccacctg

SEQ ID NO: 1711 - DNA, 357 bp, Glycine max
  Clone ID: V4R-02-Q1-E1-E12
gaattcgaaacttaaactgttattcatgaagcaaatgactaaagtcattctcaacttccgatcatagatttgttgcatatgtacacaagctaaaagaaaatgaaatcccgaaagtgctaataagtcaccccattacatattatgttgctaacaccattaaaaacataaaagaaaaaaagttccttatagtagggtttttttttcaatgtgtttatttttttttaataataattgtaattattccaatcgatatttaatcacccttaaattttctcattcatctcccccaatatattttaaaaactcatggttgaatgcatgcttgtgagtccccccaaggagcccaattggcctcac

SEQ ID NO: 1712 - DNA, 240 bp, Glycine max
  Clone ID: V4R-02-Q1-E1-F10
gccaacaagagatgttacttgatacagtacattcacaatcctagcattcattttcccaatcttatcatacatcaaaatggcccgaatcaatagtgaagaaaagaaacaataaatacaataccccatgtaattcactactttcaaaacaacctattggtagttgtaacatcgttgggatatcaataaatgaaggcaagtaggccagaaaataaaaatagatcacgaaatctaacacaagat

SEQ ID NO: 1713 - DNA, 354 bp, Glycine max
  Clone ID: V4R-02-Q1-E1-F12
aacaaacagcagaattgaatagatgtcaaactaatataaaacaccgtctgttacaaagcttttcatatttatggcggaaatgctgttcaaaatagaacccaaagagttcaacataaactatgaaagaaacaaaatttgagaacaaataacaccctaaaaatcttctcaagtagtcttatccgctttagcagcagtggcagcagcttgccccctaagacgaccagtcctcctagcagcaatgagaccaaccttctggccaggaggagcatcacgcctcacggtactcgcatgcccaatatgctgatgattacctcctccgtgaagatgctcaactgggttcatccgccacactcg

SEQ ID NO: 1714 - DNA, 254 bp, Glycine max
  Clone ID: V4R-02-Q1-E1-G10
gggggtaaattaaaaaagcgtaaaatttcaaatgcattgaacgggtacagccatgtgaacttgcaattcaggtccaaagctcaaaaatccattgagagtgaattaaaataaagtaacgaaaatcaaataattaaaaaagcaattggacatgatcaaacacttccaccgatcagattaatgaaacttagcaacaagtcatcagacaggttatatacaacaaagcaacttaggggggcatcgggatgtaaaaccca

SEQ ID NO: 1715 - DNA, 378 bp, Glycine max
  Clone ID: V4R-02-Q1-E1-G12
aaaccaaattgaagctaattttttcaaaaaccttgatgaaatcataaccagttcagcaaactataattttcatgttgaatgtctgacaacaatcgaaagtaaattgacacgcataattctattttacattagctgacatatgcaatgcagaagctataataaattaaagataagatgatgctatcattcatatcagcagagaatataaatgtgatgagtttgcacaatcattcttatagttgccatcactgcaaccaaattcatgccttcaaagcttcccatgcatataaggatgaacttaatctgctgtccaactctgctccacaatttccctcactcttcgattgtactcacgcttgttctcactaaacattcgag

SEQ ID NO: 1716 - DNA, 348 bp, Glycine max
  unsure (1)..(348): unsure at all n locations
  Clone ID: V4R-02-Q1-E1-H10
aacttggaacattctttttgatactgatattaagagacacaatggtcggaaaacagagagtacattttttagttgatcatgtaaaaaattacaaatgaaaggcaggagaaacaaaataggaggaggacgacgagagaaaaacacagagcaagggacgtggaaagttatggataatagacattataagggcaacgctaaaaaactcccagcacattgcagtggaatgaatggccttaggccttctcncacttgaggggcttgaccacttcccatgtgaagtcagggtcctctctgccgaagtgtccatatgcagcagtcttcaagaacctgttattcccaaccctcttg

SEQ ID NO: 1717 - DNA, 383 bp, Glycine max
  unsure (1)..(383): unsure at all n locations
  Clone ID: V4R-02-Q1-E1-H12
tttttaaaccttggtgtcagacttacgtatagattgaattcaatgataaacacaagtatatttcagaggaaacccaaaaatgttaacaacgatgtactacttgatacttcctcagttgaaagggaaaaaaagaaaagtaaatcttgacaacaaactagttatgtcctcccttacgatgttaaacgacctacaagtataacgatccctcaaacaaggggtgtgggagagctcgttggagtcacagacaacattatntgcttggcagaacttagaaaccgaagaagccaagctcactagctctctccttctcagatgtctcaaagtactgatagatgattgttactgcaagcaatattccggttcctgaaccgatggcccccatg

1-7. (canceled)

8. A substantially purified nucleic acid molecule comprising a nucleic acid sequence wherein said nucleic acid sequence:
(a) hybridizes under stringent conditions to a nucleic acid sequence selected from the group consisting of SEQ ID NO: 1 through SEQ ID NO: 1717, a complement thereof or a fragment of either, or
(b) exhibits an 90% or greater identity to a nucleic acid sequence selected from the group consisting of SEQ ID NO: 1 through SEQ ID NO: 1717, a complement thereof or a fragment of either.

9. The substantially purified nucleic acid molecule of claim 8, wherein said nucleic acid molecule encodes a soybean protein or fragment thereof.

10. A substantially purified nucleic acid molecule comprising a nucleic acid sequence that shares between 100% and 90% sequence identity with a nucleic acid sequence selected from the group consisting of SEQ ID NO: 1 through SEQ ID NO: 1717, a complement thereof or a fragment of either.

11. The substantially purified nucleic acid molecule of claim 10, wherein said nucleic acid sequence shares between 100% and 95% sequence identity with a nucleic acid sequence selected from the group consisting of SEQ ID NO: 1 through SEQ ID NO: 1717, a complement thereof or a fragment of either.

12. The substantially purified nucleic acid molecule of claim 11, wherein said nucleic acid sequence shares between 100% and 98% sequence identity with a nucleic acid sequence selected from the group consisting of SEQ ID NO: 1 through SEQ ID NO: 1717, a complement thereof or a fragment of either.

13. The substantially purified nucleic acid molecule of claim 12, wherein said nucleic acid sequence shares between 100% and 99% sequence identity with a nucleic acid sequence selected from the group consisting of SEQ ID NO: 1 through SEQ ID NO: 1717, a complement thereof or a fragment of either.

14. The substantially purified nucleic acid molecule of claim 13, wherein said nucleic acid sequence shares 100% sequence identity with a nucleic acid sequence selected from the group consisting of SEQ ID NO: 1 through SEQ ID NO: 1717, a complement thereof or a fragment of either.

15. A substantially purified polypeptide, wherein said polypeptide is encoded by a nucleic acid molecule comprising a nucleic acid sequence, wherein said nucleic acid sequence:
(a) hybridizes under stringent conditions to a nucleic acid sequence selected from the group consisting of SEQ ID NO: 1 through SEQ ID NO: 1717, a complement thereof or a fragment of either, or
(b) exhibits an 90% or greater identity to a nucleic acid sequence selected from the group consisting of SEQ ID NO: 1 through SEQ ID NO: 1717, a complement thereof or a fragment of either.

16. A transformed plant having a nucleic acid molecule which comprises:
(a) an exogenous promoter region which functions in a plant cell to cause the production of an mRNA molecule; which is linked to;
(b) a structural nucleic acid molecule, wherein said structural nucleic acid molecule comprises a nucleic acid sequence, wherein said nucleic acid sequence
(i) hybridizes under stringent conditions to a nucleic acid sequence selected from the group consisting of SEQ ID NO: 1 through SEQ ID NO: 1717, a complement thereof or a fragment of either; or
(ii) exhibits an 90% or greater identity to a nucleic acid sequence selected from the group consisting of SEQ ID NO: 1 through SEQ ID NO: 1717, a complement thereof or a fragment of either,
which is linked to
(c) a 3′ non-translated sequence that functions in said plant cell to cause the termination of transcription and the addition of polyadenylated ribonucleotides to said 3′ end of said mRNA molecule.

17. The transformed plant according to claim 16, wherein said nucleic acid sequence is a complement of a nucleic acid sequence selected from the group consisting of SEQ ID NO: 1 through SEQ ID NO: 1717 or a fragment thereof.

18. The transformed plant according to claim 16, wherein said plant is selected from the group consisting of soybean, maize, cotton and wheat.

19. A transformed seed comprising a transformed plant cell comprising a nucleic acid molecule which comprises:
(a) an exogenous promoter region which functions in said plant cell to cause the production of an mRNA molecule; which is linked to;
(b) a structural nucleic acid molecule, wherein said structural nucleic acid molecule comprises a nucleic acid sequence, wherein said nucleic acid sequence
(i) hybridizes under stringent conditions to a nucleic acid sequence selected from the group consisting of SEQ ID NO:1 through SEQ ID NO:1717, a complement thereof or a fragment of either; or
(ii) exhibits an 90% or greater identity to a nucleic acid sequence selected from the group consisting of SEQ ID NO: 1 through SEQ ID NO: 1717, a complement thereof or a fragment of either,
which is linked to
(c) a 3′ non-translated sequence that functions in said plant cell to cause the termination of transcription and the addition of polyadenylated ribonucleotides to said 3′ end of said mRNA molecule.

20. The transformed seed according to claim 19, wherein said nucleic acid sequence is a complement of a nucleic acid sequence selected from the group consisting of SEQ ID NO: 1 through SEQ ID. NO: 1717 or a fragment thereof.

21. The transformed seed according to claim 19, wherein said seed is selected from the group consisting of soybean, maize, cotton and wheat seed.

22. The transformed seed according to claim 19, wherein said exogenous promoter region functions in a seed cell.

23. The transformed seed according to claim 19, wherein said exogenous promoter region functions in a leaf cell.

24. A method of producing a genetically transformed plant, comprising the steps of:
(a) inserting into the genome of a plant cell a recombinant, double-stranded DNA molecule comprising
(i) a promoter which functions in plant cells to cause the production of an RNA sequence,
(ii) a structural nucleic acid molecule, wherein said structural nucleic acid molecule comprises a nucleic acid sequence, wherein said nucleic acid sequence
(A) hybridizes under stringent conditions to a nucleic acid sequence selected from the group consisting of SEQ ID NO: 1 through SEQ ID NO: 1717, a complement thereof or a fragment of either; or
(B) exhibits an 90% or greater identity to a nucleic acid sequence selected from the group consisting of SEQ ID NO: 1 through SEQ ID NO: 1717, a complement thereof or a fragment of either,
which is linked to
(iii) a 3′ non-translated sequence which functions in plant cells to cause the addition of polyadenylated nucleotides to the 3′ end of RNA sequence,
(b) obtaining a transformed plant cell with said structural nucleic acid molecule that encodes one or more proteins, wherein said structural nucleic acid molecule is transcribed and results in expression of said protein(s); and
(c) regenerating from said transformed plant cell a genetically transformed plant.

25. A method for reducing expression of a protein in a plant cell comprising growing a transformed plant cell containing a nucleic acid molecule wherein the non-transcribed strand of said nucleic acid molecule encodes a protein or fragment thereof, and wherein the transcribed strand of said nucleic acid molecule is complementary to a nucleic acid molecule comprising a nucleic acid sequence selected from the group consisting of SEQ ID NO: 1 through SEQ ID NO: 1717, a complement thereof or a fragment of either, and whereby said transcribed strand reduces or depresses expression of said protein.

26. A method for increasing expression of a protein in a plant cell comprising growing a transformed plant cell containing a nucleic acid molecule that encodes a protein or fragment thereof, wherein said nucleic acid molecule comprises a nucleic acid sequence selected from the group consisting of SEQ ID NO: 1 through SEQ ID NO: 1717, a complement thereof or a fragment of either, and whereby said nucleic acid molecule increases expression of said protein.

27. A method of producing a plant containing reduced levels of a protein comprising:
(a) transforming a plant cell with a nucleic acid molecule comprising a nucleic acid sequence selected from the group consisting of SEQ ID NO: 1 through SEQ ID NO:1717, a complement thereof or a fragment of either, wherein said nucleic acid molecule is transcribed and results in co-suppression of endogenous protein synthesis activity, and
(b) regenerating said plant comprising said plant cell and producing subsequent progeny from said plant.

28. A method of growing a transgenic plant comprising
(a) planting a transformed seed comprising a nucleic acid sequence selected from the group consisting of SEQ ID NO: 1 through SEQ ID NO: 1717, a complement thereof or a fragment of either, and
(b) growing a plant from said seed.
